United States Patent Application Publication US 2025/0236857 A1 - sequence listing, part 4

SEQ ID NO: 18250 - protein, 421 aa, unidentified
MQYVYVLSKHGEPLMPCSPGKARLLLKEKKARVVRRTPFTIKLLYGSAGYKQPITLGVDAGSKHVGLSASTKKRELYREEFTPRNDVVDLLSTRRQNRRSRRNRKTRYRAPRFDNRVHSKHKGWLAPSVEVKIQEHITVIKRICRILPISLVRVETAEFDTQRLKAMLEGKSLPVGTDYQLGEMYDEYNVRQYVLKRDNYTCQCCGAHPTEKKPVRLHVHHLESRHVGGNAPNNLITLCVACHKALHEGKITLDKGKKRGKPLRDAAFMGIMRNTLLARLKDELNIPVKQTYGYITKLLREKNKIPKSHVNDARCIAKAPNAKPCDTMLYTRALRHHNRQIHKAKILNGGIRKKNQAPYLVKGFRLWDKVRYNGEECFITGRRSSGYFALKKYDGTVISNSASYKKLMLLEAATNYITERS

SEQ ID NO: 18251 - protein, 424 aa, unidentified; identical to SEQ ID NO: 5750

SEQ ID NO: 18252 - protein, 475 aa, unidentified; identical to SEQ ID NO: 15899

SEQ ID NO: 18253 - protein, 389 aa, unidentified
LTKDENRPSGRTTGLRAEQAEPAGIRKGDTLKVFVLNMRGKSLMPCSPAKARHMLKAGKAVVVRRTPFTIKLTIATGETKQDVTLGVDAGARHVGISATTEKEEVFASEVALRQDITGLLADRLAFRRARRNRKTRYRAPRFNNRVRSKHKGWLAPSVENRIQAHMSRIEAVCRLLPVTKIVIETASFDIQKIRNPEVEGTGYQQGDQLGFWNVREYVLFRDGHVCQHCHGRSRDKILNVHHLESRKTGGDAPNNLITLCETCHKAYHAGKIKLKVKRGQSFRAEAFMGIMRWTLLDRVRKTHPELPVENTYGYLTKHKRIALGLPKTHCADAFCIAGNLKALEEEISSSNNRRESTTDRYTGVRFSKAECENSIRRHSSSRGSAYSTR

SEQ ID NO: 18254 - protein, 417 aa, unidentified
MPCSPAKARLLLKEKKAIVKRRTPFTIQLTIATGEAKQPVTLGVDSGYKHIGLSATTEKAELYASQVELRQDITDLLSARLALRRSRRSRKTRYRAPRFDNRVASKRKGRLAPSVENRIAAHMSRVEAVMRVLPVTAITVETAAFDTQLLKNPDIAGAAYQQGEQLGFWNVREYVLFRDGHVCQHCRGKSKDPILNVHHIESRRTGGDAPNNLITLCETCHKAFHRGEIELKIKRGKSFKAETFMGIMRWTLFERLKKAHPELNVHNTYGYLTKHKRISYGIAKNHCADAYCIADNLSAKRLKGFFFQKQTRKHNRQIHKLSILKGGLRKKNQAPYEVKGFRLFDKVICKGEEAFIFGRRTSGSFDVRRLDGTRISAGINYKKLRLLEPRTTYLTEFRKEAALPPLHKCRGFRAEFL

SEQ ID NO: 18255 - protein, 442 aa, unidentified; identical to SEQ ID NO: 2834

SEQ ID NO: 18256 - protein, 415 aa, unidentified; identical to SEQ ID NO: 10543

SEQ ID NO: 18257 - protein, 422 aa, unidentified
MRGKPLMPCSAAKARILLKEKKAAVAKRTPFTIRLTTAGGEAKQPVSLGVDAGYKHVGLSASTEKAELYASEIELRQDITDLLSARLALRRARRSRKTRYRAPRFDNRVRSKRKGWLAPSIENRIAAHISRIEAVLRILPVTKITVETASFDMQLLKNPDISGKGYQQGEQLGFWNVREYVLFRDGHVCQNCGGRSKDPVLNVHHLESRRTGGDSPGNLITLCETCHKALHRGEITLSIKRGASFRAEAFMGIMRWKVLERLKATHPELEVRNTYGYLTKHARIEHGIAKSHCADAFCIAGNLKAERLGSFYYQKQTRRHNRQIHKLSILKGGVRKRNQAPYEVKGFRLFDKVACKGETAFIFGRRSTGSFDVRKLDGTRISAGISFKKLRLLERRRTFLTEIRKEAALPPLPEGRGLRADF

SEQ ID NO: 18258 - protein, 509 aa, unidentified
MPDTDYIYVLGVDGKPQMPTKRKRHVKRLLDTGKARIACHVPYTIQLLYENTPVLQPVMLAEDPGRTNIGMAVLSVKGELLMSAVVETRNREIVRLMNHRRGYRRASRNGERKARQRLAKRFSTMLKAGMLMRKLPKFAADKFITCHCIKNTESRFCNRKRPDGWLTPTSRQLVETHINLIHKIQKYLPVTDIAMEVNRFAFLSLENPSVSGADFQNGPLKGFDSLHDAVNELQHGKCLLCNKKIEHYHHIVPRSMNGSNTIGNIAGLCMECHDKVHKYASHQKKLNDVKKGLDKKYGALSALNQAVPFICKRLEAEFGKEHVSYCTGRDTAKMRNSFGFQKTKDNQMHETDAWCIGILALNRISDGVPDFGQTYCIRQFRRQDRSFIYAQTERVYKLDGVIVAKNRKKRTEQKTDSLEDWYNRQVVLYGKKEADFMRSRLTVIKSKRRYNDLTRVMPGAVFMYNGVCHVLSGRLTEGQYFRAVGDAKTNYPASKCKIIRHNEGLVFVC

SEQ ID NO: 18259 - protein, 513 aa, unidentified; identical to SEQ ID NO: 3179

SEQ ID NO: 18260 - protein, 408 aa, unidentified
LKVFVLNMRGKPLMPCSPAKARHMLKAGKAFVVRRTPFTIKLTIATGETKQDVTLGVDAGARHVGISATTEKEEVFASEVALRQDITGLLADRLAFRRARRNRKTRYRAPRFNNRVRSKHKGWLAPSVENRIQAHISRIEAVCRLLPVTKIVIETASFDIQKIRNPEVEGTGYQQGDQLGFWNVREYVLFRDGHICQHCRGRSKDPILNVHHLESRKTGGDAPNNLITLCETCHKAYHAGKIKLKVKRGQSFRAEAFMGIMRWTLLNRMRKAHPSLPVENTYGYLTKHKRIALGLPKTHCADAFCIAGNLKALRRGDFLFLQQTRKHNRQIHKCSILKGGVRKLNQAPFLVKGFRLFDKVRIGGQIGFVFGRRVRGTFNIRRLDKTVIGTDINCKKTESSRNTQNFFD

SEQ ID NO: 18261 - protein, 428 aa, unidentified; identical to SEQ ID NO: 5055

SEQ ID NO: 18262 - protein, 438 aa, unidentified
MSQVFVLDANKQALNPIHPGRARLLLKQGKAAVYRRYPFTIILASAVEQPPLHPLRIKVDPGSQTTGIALVNDLTGEVVWAAELAHRGEQIKRGLDKRRAIRRSRRQRKTRYRKPRFANRGKRTGTLPPSLESRVCNVLTWVRRLMRLCPVTAISQELVRFDTQALEHPDIEGVEYQQGQLSGYEVREYALLKWNHQCAYCDARGVPLELDHVQPRSKHGSNRVSNLTLACLSCNQRKGNRDVREFLHDDPARLVRMLAHMKAPLRDAAAVNATRWALYERLKILDLPVEGGSGGETAYNRVMRGLDKSHWLDAANVGRSTPASLIIKDIVPLHITATGHGSRQMCRMDKYGFPRSGPKQHKRVQGFQTGDLVRAVVTSGTKQGTYVGKVAVRTRGSFNITTAQGVVTDIHHRFCVLIARSDGYSYQQRKEAALPPTA

SEQ ID NO: 18263 - protein, 397 aa, unidentified
  source 1..397: note = Bacterium sp.
MTPKVFVIDKKGKPLLPTHPARARKLLRSGKAKVTRVVPFTIQLERIIEKEVGSFVIGIDDGAKEVGIAILNKKTQEVVFRGTIKLRQDVSRKIKQRAQLRRNRRCRKLRHRKARFKNRKPKTPQPSIRQRKESIVRVVCDLKKVLNITAGIIEQGQFDVSSLAAGRQLVSTEFQQSEYEGRNFRAKVLWRDEYTCQRCLAKEKLNAHHIMGKGKGGTDTPKNGITLCKRCHDELHSGKWQLDKKPKTFKYPMHLMQGKRYILTLLKEIGLSVTRCVGWMTAYWRKKIGIEKSHSNDAIAMVTRSYMPNIVSLEYTILPKRAKVWADNPTKQRKEKLGFKHYDLVKARHRTKGWVIGSVRALKAKVMTLRTKEDVNFPVSYRKSKLLTRFNRIIYSY

SEQ ID NO: 18264 - protein, 420 aa, unidentified; identical to SEQ ID NO: 3546

SEQ ID NO: 18265 - protein, 416 aa, unidentified; identical to SEQ ID NO: 7785

SEQ ID NO: 18266 - protein, 465 aa, unidentified
MSTCVCVLSNNGERLMPTIRLGRVRHLLKDGKAKIIKHHPFTIQLLYDSKANTQPIEICEDVGYNYIGISVKSQSHEYVSAQYDTLQDEKACHDSCRKLRRTRRNRLRYRKPRFDNRKRGEGWLAPSLRHKKELNVNVVKMYCAVMPITHATVEVGSFDTMLVKAIQEGKAIPEGADYQKGPRYNLATLREAVFYRDNYICKVCGRKATEGAILHMHHMFYWKGRHGNSLDELLTVCEKCHTSANHQKGGKLYGFGENVKFADLFGAAFMNTVRWQIVNELYTAFGKPFVTITYGTMTKEKRIALHLEKSHNNDAYAMGEFHPNHRCTFEHYEKVRRNNRTLEKFYDSRYIDIRTGEIATGKELFNGRINRNHKKDSENLHRYRGKRTYAGHRALLRKKVNLNPGDLVSLNGEVLVVHSTHTNKKGAVNVEFKTPGKSGQKSASLKKLKIVKAADSMHSAWEKIS

SEQ ID NO: 18267 - protein, 482 aa, unidentified
MPGSLSVSGKSRQHTLARRTSRPLGQEGSNPIVMRVFVLDTNRRPLSPCHPARARELLRKGKAAVFRRVPFTIILKYAPSGDPTEVEVKVDPGSRTTGMALVMERRGMDEVVWASELRHRGLEVKAKLDKRRALRRGRRSRKTRYRAPRFLNRRRKEGWLPPSLESRVYNVVTWVKRLHRLSPVAGLSMELVKFDTQAMQAPETRSVEYQQGTLYGYEVREYLLEKWGHRCAYCGAENVPLEIDHVVPRSRGGSNRVSNLTLACHDCNQKKGNRPIEEFLCRKPEVLRRVLSQAKTPLKDAAVVNATRWALLERLKVTGLSVECGTGGRTKYNRTTQGYPKKHWIDAACVGKAGDSVRLEPDMEALSIKAMGHGNRQMCRMDRYGFPRTGPKSIRTVHGFRTGDLVRAVVPNGRHAGAYRGRVAVRASGSFRIGDTDGVSWRHCYRLQYGDGYQYSIPQPKGQGTSPIPPTSEDVGFFGGIS

SEQ ID NO: 18268 - protein, 470 aa, unidentified; identical to SEQ ID NO: 5326

SEQ ID NO: 18269 - protein, 480 aa, unidentified; identical to SEQ ID NO: 14571

SEQ ID NO: 18270 - protein, 451 aa, unidentified; identical to SEQ ID NO: 10609

SEQ ID NO: 18271 - protein, 456 aa, unidentified; identical to SEQ ID NO: 6990

SEQ ID NO: 18272 - protein, 451 aa, unidentified; identical to SEQ ID NO: 3061

SEQ ID NO: 18273 - protein, 458 aa, Lactobacillus sp.; identical to SEQ ID NO: 6016

SEQ ID NO: 18274 - protein, 493 aa, unidentified
MAAVYVISASGKPLMPTTRCGHIRGLLNAGKARVVEREPFTIQLKYETPDVTQPLYLGIDPGRTNVGSAVVREDGECVFTAQLTTRNKDVPMLMKARKQFRMAHRRLKRRCKRQRRAKAAETLSQKGEFQRLLPGYEEPILCKGIRNKEARFNNRQRPAGWLTPTANHLLLTHLNMVKKLQKLLPITDVVLEVNRFAFMAMENPSIRRWQYQQGPLYGKGSVEDAVYAQQDGHCLFCGKPIAHYHHVVPQHKNGSETLENRVGLCNEHHDLVHKDRAWDAKMKETKAGLNKKYHALSVLNQIIPALTEQLTAMFPQHAFVTTGKDTADFREDYGIAKEHHLDAYCIACSVLAEPTKVAAPTGKPHRLMQFRRHDRQVCHKENIKRVYLSEGKAVATNRHKAIEQKDDSLEEFRKTHTQQEVSALTVKDHQPVYKDMRRFMPGGVFLFNGKVHTLQRSHGRYKGMPFYYIDTDGSKNHAKGCIFLQQNCGLRWV

SEQ ID NO: 18275 - protein, 420 aa, unidentified; identical to SEQ ID NO: 2812

SEQ ID NO: 18276 - protein, 406 aa, unidentified; identical to SEQ ID NO: 7406

SEQ ID NO: 18277 - protein, 416 aa, unidentified
MVYVLDKNGQPLMPTDRHRKVRLMLQSGQAKVIKRCPFTIQLNYDSGHQTQEISLGIDAGSKHIGVSATTKIKVLYEADVELRNDIVDLLSSRRELRRGRRNRKTRYRQAKFNNRRRGNGWLAPSIRQKIGTHLIVVENICKILPISRIMVETASFDIQKIKNPDIQGAEYQQGDQLGFWNIREYVLFRDNHTCQCCKGKSKDKILNVHHIESRKTGGNAPNNLITLCETCHTGYYKGTVQLPKAIKRGMRFKDAAFMGIMRWAFYEALKQQYEPVGTPVHDTYGYITKHTRIAYNLPKEHYVDARCISGNPEASSNGEYYYQKKVRCHNRQIHKLTVLKGGIRKQNQATYLVKGYRLFDKVSYQGKGYFVFGRRQSGFFDIRTLSGEKVNKGSLSCKKLKFIATRTYYLTERRAV

SEQ ID NO: 18278 - protein, 405 aa, Sulfobacillus sp.
  VARIANT 405: note = X can be any naturally occurring amino acid
MFVYVLNKHGNPLIPCSPRKARILLKAGKAIVVNRTPFTVQLLYGSSGYKQEVSLGVDAGTKPVGLSATTEKQVLYEAEGELCTDIPAWLAMRREFRRNRRPRKTRYRPARFPHRRRKAGGLPPAIQHQVATHVKVIKQVTKILPIMGITVEVAQFDTPLLKNPEVSGAAYQHGEQMGFWNVREYVFYRDHHTCQGCQGKSGDKILHGHHRESRKTGGDAPNNLVTWGETCHHKIHQEGLEDQIQRKTASLRDATQMTILRWFIYHGITAEYPQAKLTDGYITKNTRMTHGLAKSHIVDARCISGNPDAIPIAQTFLIKQVRGQNRQLHKVTILKGGVRKANKAPRHVLGFPLFDKVCVTTVGNVSSLEGVPAVTLICDYSMGQKCLPGSVTRNSRGLRQPRHFX

SEQ ID NO: 18279 - protein, 427 aa, unidentified
MVYVLAIDGEPLMPTERHGKVRRLLKEKKAKVVKRCPFTIQLLYDSTRYVQEINLGIDAGSKHIGVSATTKEKVLYEADVELRNDIVDLISTRRELRHLRRIRKTRYRKARFNNRVSTKKTGWLAPSVKQKIHTHLTVINNVYKILPIKNLIVETASFNIQKIKNPDISGEEYQQGEQKDFWNVREYVLFRDNHTCQCCKGKSKDKVLNVHHIESRKIGGNAPHNLITLCETCHKGYHNGSVKLPKSIHRGVSFRDAAFMGIMRKTLLSELRKIYPNVKETYGYITKDTRITHNLPKDHYVDARCISGNPDAKPLGYYFYQKKARCHNRQIQKMSILRGGLRKNNQAEYLVKGFRLFDKVKHNSKEYFIFGRRKTGYFDIRNFFGEKVNKGSVSYKKLKFLETRHNMLTERRKVISYPAIKAEGSLA

SEQ ID NO: 18280 - protein, 406 aa, unidentified; identical to SEQ ID NO: 18155

SEQ ID NO: 18281 - protein, 465 aa, unidentified
MSTCVCVLSNNGERLMPTIRLGKVRHLLKDGKAKIIKHHPFTIQLLYDSETNIQPIEICEDVGYNYIGISVKSQSHEYVSAQYDTLQDEKSCHDACRRMRRTRRNRLRYRQKRFDNRKRDKGWLAPSLKHKKELNVNVIKMYCEVVPITHATVEVGSFDTMLVKAIEEGKATPEGADYQKGPRYNLATLREAVFYRDNYTCQVCGREASEGAILHVHHMFYWKGRHDNSLSELITVCEKCHTPANHQKGGKLYGFGEDIKFANLSGAAFMNTVRWQIVNELYAAFGKPFVTFTYGAMTKEKRIALHLDKSHSNDAYAMGNFHPVDRCAFEHYEKVKRNNRILEKFHDSRYIDIRTGKEAKGKELFNGRISRSHKKDSENLHKYRGKRIRKGYRALRRKKVALNSGDLVSLNGETLIVHGTHTNKKGNVRVEFKVAALNGKKSASLKKLKIVKTSTPMHSAWAKVS

SEQ ID NO: 18282 - protein, 418 aa, unidentified
MVYVLGQDGHPLMPTCRHGKVKRMLKSRMAKVVKKCPFTIQLQYESTTHTQKINLGIDAGSKTIGVSATTESKVLYESEVVLRNDIVELLSGRRALRRSRRNRKTRYRKPRLDNRRRPDGWLAPSIRQKIKTHVTVVENVMKILPVTKIIVETASFDIQKIKNPKIEGAEYQYGEQLDFWNVREYVLFRDGHTCQCCKGKSKDNILNVHHIESRKTGGNAPNNLITLCETCHKAYHKGVITLPKEIHRGMRFRDAAFMGIMRWAFYDRLKELYTPFGVEVINTYGYITKNTRIEHGLPKEHYVDARCISGNPAAKPLGHYYFQKKVRCHNRQIHKNTILKGGIRKRNQAAYLVNGYRLFDKVKYQNQEYFIFGRRSSGFFDIRTLDGTKVNKGSISCKKLQLVEKSKHYLTEQRKVAA

SEQ ID NO: 18283 - protein, 411 aa, unidentified; identical to SEQ ID NO: 5446

SEQ ID NO: 18284 - protein, 431 aa, unidentified; identical to SEQ ID NO: 3801

SEQ ID NO: 18285 - protein, 414 aa, unidentified
MPCSPAKARLLLKEKKAIVKRRTPFTIQLTIATGETKQPVGLGVDAGYKHVGLSASTDKAELYASQVELRQDITDLLSARRALRRARRNRKTRYRAPRFDNRIRTKRKGWLAPSVENRINAHLSRIEAVLRLLPVTKITVETASFDMLLLKNPDIAGKEYQEGEQLGFWNVREYVLFRDGHVCQHCYGRSKDPVLNVHHLESRRTGGDSPGNLITLCETCHEALHRGEIALKTKRGHSFRAEAFMGMMRWEVLNRLKASHSELEVNNTYGYRTKHARIVNGIDKSHCADAFCIAGNLGAERLCEFFFQKQTRRNNRQIHKLSILKGGIRKRNQAPFEIKGFRLFDKVACKGEESFIFGRRSSGYFDVRKLDGTRISAGISYKKLRLLEKRRTYLTEIRKEEALPPLPEGRGLRA

SEQ ID NO: 18286 - protein, 439 aa, Ktedonobacter sp.; identical to SEQ ID NO: 9125

SEQ ID NO: 18287 - protein, 420 aa, unidentified
MQYAYVLNKRGEPLMPCSPGKARILLKQQKACVVKRTPFTIKLLHGSAGYKQPITLGVDAGSKHVGLSASTEKRELYSEEFTPRNDVVELLSTRRQSRRSRRNRKTRYRAPRFDNRVHSKHKGWLAPSVEVKIQEHITVIKRICRILPVTLVRVETAEFDTQRLKAMLAGKPLPVGTDYQLGEMYDEYNVRQYVLKRDNYTCQCCGAHTTAKKAVKLHVHHLESRKVGGNAPSNLITLCTTCHNNLHKGKITLDGKKRGKTLRDAAFMGIMRNTLLTRLRNELHIPVQNTYGYITKLLREQNDIKKSHVNDARCISKHPLAEPCSICYRTKAIRHHNRQIHKAKILKGGIRKANQAPYIVKGFRLWDKVLYNEQECFISGRRSSGYFALRKFDGTTITNSISFKKLRLLEPATNYLIERK

SEQ ID NO: 18288 - protein, 427 aa, Nostoc sp.; identical to SEQ ID NO: 2670

SEQ ID NO: 18289 - protein, 420 aa, unidentified; identical to SEQ ID NO: 9880

SEQ ID NO: 18290 - protein, 406 aa, unidentified; identical to SEQ ID NO: 6079

SEQ ID NO: 18291 - protein, 502 aa, unidentified; identical to SEQ ID NO: 11560

SEQ ID NO: 18292 - protein, 478 aa, unidentified
MVVYILNKDNKPLMPCRPQRARKLIKEKKAKVVSYKPFTIKLLYGSYGYTQNTNLGIDLGSKHIGVAISSQDIVLSKGEIELRQDVSSLIETKATLRRSRRNRKTRYRKCKFNFRNKRVFNTPKGTKLKPLKKVAKAPIANHLEKQVGCSKGSNSKNNWRTLATNIDSSRLDGWLPPSIQSRIDNTFFWIDKYYNLLPKCNLSIEVGKFDMAKMINSEIEGTDYQQGEAFGFYNTRYYVFARDNYTCQVCKKSKDKILHTHHVLYKSKGGSDRAENLATVCDDCHTYENHQPGGILYEWMIKKKKMKSYKEPPFMNAMRIRIFKKYPNANITYGSITTPKRKELGLDKSHFNDAIAISGIDTIKSNCNEVFKIRQFRKKKRSLHEATARKGRKTKNTESKRNEKNTNYANGFYLNDKVEIFGQAGYITGFSGTSSVYVKNINDEYITIPEKKYKQVPISNLKFVSHNNNWQYEHCWSV

SEQ ID NO: 18293 - protein, 434 aa, unidentified; identical to SEQ ID NO: 9304

SEQ ID NO: 18294 - protein, 456 aa, Halomonas sp.; identical to SEQ ID NO: 17892

SEQ ID NO: 18295 - protein, 420 aa, unidentified
MVYVISIDNEPLMPCSNVIARLLLKNGKAKVKRKCPFTIKLRYPTSTYTQNLTLGVDTGSSHIGSSVSDDKGNIYYMSDTKIRNDIADKMKQRLAYRRNRRERKTRYRKARFLNRKNSKKKDRFSPTMISKFHSHVKEIEFIQSILPITTLVLETGNFDTHLMKNPSLAKENVKHWGYQQGANYGFENTKAKVLNRDNYTCQCCKGKRKDSKLEVHHIIFRSNGGSDEEDNLITLCHTCHFKVHHGLQKLNLKGKVKGTLKFATQMNSIRKHLLERVYPDAIETFGYVTKQNRYLNGVEKSHYLDACMIASGGKQIKILQKEVYFKVDVAKGDYQQRKGIRSEKVIPTGKMKGIRKFDKVRYLGKEYFVKGRMSSGYGILMDIDGKKIDFSHLKKGKTPKLDNLERISARTTQMIDRKVI

SEQ ID NO: 18296 - protein, 423 aa, Scytonema sp.; identical to SEQ ID NO: 3612

SEQ ID NO: 18297 - protein, 424 aa, unidentified; identical to SEQ ID NO: 12629

SEQ ID NO: 18298 - protein, 458 aa, unidentified
LVFVLNYKKKPVDMCSNAEARILLKKGYAVVHKAHPFTIRLKRDADYSQETEKEYKLKIDPGSKHTGVAIVDDEDSVVFLGEIEHRGSQIVALLKTRSNVRRNRRSRKTRYRRCKFVNYYLKKDSKYKADSNRPKGWFPPSIESIKNNIVNFLKKYKKLCNITSVSIESVKFDSQLLENPDISGVMYQQGTLFGYELREYLLDKYGHNCQYCSGESKDTRLEIEHKVPKSRGGSDRVDNLTIACRSCNQDKSNLTLEKYLNRLKNAKSKNKLTQKRINNITDILDKGTIHKHQRYSAWVNSYRLKLIEEIKPLVNDVELSTGGRTKYNRTNLNLPKTHYYDALCVGEVPENFNFKTDKVLEIKAYGRGSRFRGRTNSCGIITKNLPRQKNFFGFQTGDIVKANVAKGKKAGSYYGRVAVRSSGYFNIQEKNKTTQGIKHTDCKIVQRSDGYGYNLKDV

SEQ ID NO: 18299 - protein, 451 aa, unidentified; identical to SEQ ID NO: 2593

SEQ ID NO: 18300 - protein, 413 aa, unidentified
LKVFVLNMRGKPLMPCSPAKARHMLKAGKAFVVRRTPFTIKLTIATGETKQDVTLGVDAGARHVGISATTEKEEVFASEVALRQDITGLLADRLAFRRARRNRKTRYRAPRFNNRVRSKHKGWLAPSVENRIQAHISRIEAVCRLLPVTKIVIETASFDIQKIRNPEVEGTGYQQGDQLGFWNVREYVLFRDGHICQHCRGRSKDPILNVHHLESRKTGGDAPNNLITLCETCHKAYHAGKIKLKVKRGHSFRAEAFMGIMRWTLLNRMRKAHPSLPVENTYGYLTKHKRIALGLPKTHCADAFCIAGNLKALRRGDFLFQQQTRKHNRQIHRCSILKGGVRKLNQAPFLVKGFRLFDKVRIGGQIGFVFGRRVRGIFNIRRLDKTVIGTDINCKKLSLLEIRKTFLTELRKE

SEQ ID NO: 18301 - protein, 420 aa, unidentified
MQYVYVLNKHGEPLMPCSPRKARLLLKQKKACVVKRTSFTIKLLYGSTGYKQPITLGVDAGSKHIGISATTEKHELYREEATPRNDVVDLLSARRAFRRSRRNRKTRYRAPHFNNRVHSKHEGWLAPSVEVKIREHITLIKRVCRTLPVTLVRVETAEFDTQRLKAMLEGKPLPVGTDYQLGEMYDEYNVRQYVLKRDNYTCQCCGAHSTKTKDVKLHVHHIETRRTGGNAPNNLITLCTDCHKALHAGKVTLDGKKRGKPLKDAAFMGVMRKTLMERLRKKLKIPVQGTYGYITKYLREKNGIPKSHTNDARCISKNPLAIPCDTCYYTKAVRHHNRQLHKATILKGGIRKANQAPYIVKGYRLWDKVSCNGTECFITGRRTSGYFALKKLDGTVVSNSTSYKKMRLLEVATNYITERR

SEQ ID NO: 18302 - protein, 452 aa, Lactobacillus sp.; identical to SEQ ID NO: 3322

SEQ ID NO: 18303 - protein, 413 aa, unidentified; identical to SEQ ID NO: 5477

SEQ ID NO: 18304 - protein, 416 aa, unidentified
MVYVLDKNGQPLMPTDRHRKVRLMLQSGQAKVIKRCPFTIQLTYNTGHQAQEISLGIDAGSKHIGVSATTKTRVLYEADVELRNDIVDLLSSRRELRRGRRNRKTRYRPARFDNRRREDGWLAPSIRQKIGTHLTVVENICKILPISRITVETASFDIQKIKNPDIQGAEYQQGDQLGFWNNREYVLFRDNHTCQCCKGKSKDKILNVHHIESRKTGGNAPNNLITLCEICHTGYHKGAVQLPKTVKRGMRFKDAAFMGIMRWAFYEALKQQYEPVGTPVHNTYGYITKHTRIAYNLPKEHYVDARCISGNPEASSNGEYYYQKKVRCHNRQIHKLTVLKGGIRKQNQATYLVKGYRLFDKVSYQGKGYFVFGRRQSGFFDIRTLSGEKVNKGSLSCKKLKFIATRTYYLTERRAV

SEQ ID NO: 18305 - protein, 423 aa, unidentified; identical to SEQ ID NO: 10848
  source 1..423: note = Microcoleaceae bacterium UBA9251

SEQ ID NO: 18306 - protein, 512 aa, unidentified
MSTVYVLNKDGKPLMPTTRCGHVRHLLKEQKARVVTSKPFTIQLLYEADDVVQSLYLGIDPGRTNIGVAAVKADGTAVFTAHLETRNKEIPKLMKKRKESRRTRRTNGRRCRRQRRAKANGTISKKCVKHDTAQNGSVSKRAKEIGVIKRHLPGCEKDVLCIGIKNKEAKFSNRTRPEGWLTPTANQLLQTHINLVKKIQKFLPISDVVLEINKFAFMRLDNPNVQKWQYQQGPLYQKANLEETVSEMQEHHCLFCKKKIDHYHHVVPQHKNGSNTIDNIIGLCTQHHDLVHKDATWQKRLAKKKTGLNKKYGALSVLNQIIPALTKELSSLFPKHFFVTNGKSTYDYRAAHGVSKDHWLDAYCIACSVLPNDTCDKTINSRVPYELKQFRRHDRRALNNENMSRVYTFNGKMVATNRHKATEQTTDSLEEFRQRQPNDVCNLKVKEHHPTYRNMNRNYPGSVFLVGNQVHVMQGIAGSKDGEATTYKDTNANSIAAGKCKFVAKNSGILFV

SEQ ID NO: 18307 - protein, 465 aa, unidentified; identical to SEQ ID NO: 3856

SEQ ID NO: 18308 - protein, 432 aa, unidentified
MWSTHNRSNAELSERRNTLVVYVISKDGKPLMPTTPARAKKKLRSGKAKCIRRTPFTIKLTYDSKEFTQPLTHGIDTGSSIIGSAVVDNNGEVVYLSEIEIRNDITDKMKQRAKYRRNRRNRKTRYRKARWQHRKNSIRNDRFSPTMTSKINSHLKEIRFVKSILPITHLILETATFDPHALKNPAVLQNKWLYQKGINYGFANTKAFVLDRDSYTCQYCGGKTKDSRLHIHHITFRMNGGSDEADNLITLCKTCHDKLHDGLIQLKGGKHKGQLRHATQMNSIRQQLLRQLNCDETFGFITKEHRQLMSLPKEHHMDAVAVASQGNGVTFKTSVMLQKKCLADGDYQKTKGIRSEQPITTDKICGFKKFDKVRYGGIDYFIKGRMSTGYAILMNIHGEKVAMKPIPKLDKMKRISARKSWIIQAETIRNIV

SEQ ID NO: 18309 - protein, 424 aa, unidentified
MVYVISKDGNPLMSCCNVIARLLLKQGKAQVKKREPFIIKLNYETTNYLQNLTLGVDTGSRTIGTAVSNDNGDILYMSEVVVRNDIPEKMTQRAKYRRNRRNRKTRYRKARWLNRANSIKNDRFSPTMRSKLYSHVKEIECIKSILPITQMVFETGQFDTHLMKNPSLANPRIRRWGYQKGPNYGYENTKAMVLNRDNYTCQCCKGKHKDSKLEIHHIVFRSKGGSDEASNLITLCHTCHKDLHSGKINPKLKGRIKGNLKFATQMNTIRKQLFRLYPNAIETFGYITKANRLQLGVNKEHYYDACTIATQGNRFTIKSNLYKKKCISDGDFQQTKGICSKQPIVTNKIHGFRKFDKVRYLGKNYFIKGRMSTGYAVLMDINGKKADFSNMPKGFKTPKMANFKRIEARTTWMTTTVVLTSNIA

SEQ ID NO: 18310 - protein, 423 aa, unidentified; identical to SEQ ID NO: 12332

SEQ ID NO: 18311 - protein, 518 aa, unidentified; identical to SEQ ID NO: 8622

SEQ ID NO: 18312 - protein, 361 aa, unidentified; identical to SEQ ID NO: 7533

SEQ ID NO: 18313 - protein, 423 aa, Moorena sp.
MRVFVLNNNLQPLDPCKPARARILLSTGKAKVYRRYPFTIVLREEIKEPITHEHQLKIDPGAKTSGLAIVQGERVIWGAELTHRGFKIRDALNFRRQLRSSRRNRKTRYRKPRFLNRTRPEGWLPPSLMSRVQNILTWVKKLTRLCPVAGISQELVRFDTQKLQNPEISGIEYQQGTLYGYELREYLLEKWNRKCAYCGATGIQLEIEHIKPKSKGGSDRASNLTIACHPCNQAKSNQDIELFLSLKPSILKRILSQAKRPLVDAASVNSTRWKLYHELKSIGLPVEVGSGGLTKFNRCRQNLPKTHWLDAANVGKVETLIVEVTHPLIITAKGHGTRQLCRTNKYGFPIRHCSRIKFHKGFQTGDIVRAVVTKGKKVGTYVGRVATRKSGSFNISTKLGLVQGISHKYCQFIHRKDGYAYTN

SEQ ID NO: 18314 - protein, 407 aa, Succinivibrio sp.; identical to SEQ ID NO: 12001

SEQ ID NO: 18315 - protein, 448 aa, unidentified; identical to SEQ ID NO: 4254

SEQ ID NO: 18316 - protein, 424 aa, unidentified; identical to SEQ ID NO: 2430

SEQ ID NO: 18317 - protein, 431 aa, unidentified; identical to SEQ ID NO: 15055

SEQ ID NO: 18318 - protein, 417 aa, Sutterella sp.; identical to SEQ ID NO: 8821

SEQ ID NO: 18319 - protein, 450 aa, unidentified; identical to SEQ ID NO: 2935

SEQ ID NO: 18320 - protein, 420 aa, unidentified
MQYVYVLSKHGEPMMPCSPGKARLLLKQQKACVVRRTPFTIKLLYGSAGYKQPITLGVDAGSKHVGLSASTEKRELYREEFTPRNDVVELLSTRRQNRRSRRNRKTRYRAPRFDNRVHSKHKGWLAPSVEVKIQEHITIIKRICKILPISLVRVETAEFDTQRLKAMLAGKPLPVGTDYQLGEMYDEYNVRQYVLKRDNYTCQCCGAHTTAKKLVKLHVHHLESRKTGGNAPSNLITLCTTCHKNLHKGKVTLDGKERGKPLRDAAFMGIMRKTLMARLKKELPIPVQGTYGYITKMRREQNDIKKSHTNDARCISKHPLAEPCSVCYRTKAIRHHNRQTHKANFSKKGIRKRSQMPYLVEGYRLWDKVLYKEQKCFVSGRRSSGSFTLKKLDGTSVSKGVTFKKLRLLEPATNYLIERM

SEQ ID NO: 18321 - protein, 408 aa, unidentified
MPCENVVARLLLKQKKAKVKRKTPFTIKLLYDTTEYVQDCTLGVDTGSSHVGTSVINSKNEVLYMSDVEIRNDIADKMSQRAKYRRNRRNRKTRYRKARWLNRKNSIKKDRFSPTMRSKLDSHMKEIEFIKSILPISRLVMETATFDPHLLKNSSLHNPIYKKWGYQQGGNYGFENTKAKVLNRDNYICQHCKGRRKDSKLEVHHIIYRSNGGSDEEDNLITLCHTCHKCVHSKSIKLKLLGKRKGQLKHATQMNSIRLQLLKLCSDAIETFGYITKANRLLLRVDKKHHLDACIIASGGNKFTIRQNILYRKKCIPNGDFQQTKGVRSQQAIPTGKIQGFRKFDKVRYLGKEYFIKGRMSSGYAILMDIEGNKVDFSSMPKGWKTPKLSNCKRISARKTWMVDSLVV

SEQ ID NO: 18322 - protein, 472 aa, unidentified
FRQVPFTIQLTYENEPVLQPVTIAEDPGRSNIGMAVVSLSGELLSAAVVQTRNKEIAKLMEKRKQHRRASRNGERKARQRLAKKCHTMFKAGFLMRKLPMYGKDKRVKCHVIRNTEARFCNRKRKDGWLTPSAEHLVRTHINLVHKMQKFLPITDVAVEINRFAFLSLEDPSVSGVDFQNGPLKGYDNLNAAVEDLQDGHCLMCKDPIEHRHHIVPRSIQGSNTIENIAGLCCKCHEKVHKNAAFEKRLKKKKAGLDKQYAAVSVLNQAIPFICKRLEQEFGKEHVHYCSGRETAMVRRSFGYHKTKEEPLHEVDAWCIAVLSLQQVPEKAPEFDHVHKIMQFRRQDRSRIKAQTSRTYYYEGKKVAKNRKKAEGQKEDSLQEWRECQITLYGEEQARKMTSQLKVRKSIRRYNRLDRLMPGAVFYYKGTRYVMRGQHGNGRYLQAVGMGNKDFPVKDCKIVIQNEGLVFLS

SEQ ID NO: 18323 - protein, 424 aa, unidentified; identical to SEQ ID NO: 3232

SEQ ID NO: 18324 - protein, 423 aa, Arthrospira sp.; identical to SEQ ID NO: 3079

SEQ ID NO: 18325 - protein, 423 aa, Arthrospira sp.; identical to SEQ ID NO: 12548

SEQ ID NO: 18326 - protein, 431 aa, unidentified; identical to SEQ ID NO: 2746

SEQ ID NO: 18327 - protein, 457 aa, unidentified
MDAVAVISASGKPLMPTSPVRARKLIKKGKAVIYKYRPLFTIRLTERTDGDIQTIEYCCDTGYQHIGLSIKSRKHEYVNEQRDLLPDETEHHNDSRMYRRARRRRKLRHRACRRDNRHDNQICKDGYAPSIRNRRDQHISLYKSYTRILPVERAVFEMGQFDTQVLKAIEKGEPVPQGKDYQHGYRYGYATLREAVFARDNYTCICCGKNAFKDKRIMCVHHLGFRTGDRTNRLANLATVCTKCHTPKNHQPKGKLYNLKPKLKDFKGATFMTMVRWDMLDRLKTVSKGVRVDVTYGAATKEARHDLKIKKSHANDAYCMGNFHPSHRTDLKRYEKCRRNNRVLSKFYDATYIDIRDGEKKKANALGCNRTKRRESRRSEKNERIYRGKKMSKGRIVLRTKRAVIRPGDTVHVGKKKYIVASSKNLGAQLKLADGSLLTASKVTEIIHCGGWKTVNL

SEQ ID NO: 18328 - protein, 447 aa, unidentified; identical to SEQ ID NO: 12599

SEQ ID NO: 18329 - protein, 424 aa, Succinivibrio sp.; identical to SEQ ID NO: 15364

SEQ ID NO: 18330 - protein, 431 aa, Escherichia sp.; identical to SEQ ID NO: 10818

SEQ ID NO: 18331 - protein, 421 aa, unidentified; identical to SEQ ID NO: 4235

SEQ ID NO: 18332 - protein, 439 aa, Campylobacter sp.; identical to SEQ ID NO: 4429

SEQ ID NO: 18333 - protein, 415 aa, Bacillus sp.; identical to SEQ ID NO: 2431

SEQ ID NO: 18334 - protein, 413 aa, unidentified; identical to SEQ ID NO: 7541

SEQ ID NO: 18335 - protein, 427 aa, unidentified
VSKIFVIDQNKRPLAPIHPAQARQLLKNKKAAIYRQFPLTLILKESRTESPVSLNRLKIDPGAKHTGIALVNDTSGEVVFAAELKHRGFAIRDALTSRRQLRRSRRARKTRYRKPRFLNRTRPSGWLAPSLQSRVDNIKTWVDKLRRFAPITSISQELVRFDMQLMRKPDIQGREYQQGTLAGYETREFLLEKWGRQCAYCQVLDVPLQIEHIHPRAKGGSNSISNLTLSCEKCNTKKGARDIKDFLKKDPSKLEKILKQAKRPLADAAAVNTTRFALLEVLKATGLPVETGSGGLTKFNRSQHNLVKTHWLDAACVGKSTPKLIIKGVKPLLIAANGHGSRQSCRTDKFGFPSRHVPREKIHFGFQTGDIVKSFVTTGKKIGNYVGKVAIRSSGSFNVSTKNGLVQGISHKFCKRIHAKDGYSYAY

SEQ ID NO: 18336 - protein, 470 aa, unidentified; identical to SEQ ID NO: 2949

SEQ ID NO: 18337 - protein, 414 aa, unidentified; identical to SEQ ID NO: 2588

SEQ ID NO: 18338 - protein, 352 aa, Parasutterella sp.; identical to SEQ ID NO: 7917
  VARIANT 40: note = X can be any naturally occurring amino acid

SEQ ID NO: 18339 - protein, 430 aa, unidentified; identical to SEQ ID NO: 16611

SEQ ID NO: 18340 - protein, 512 aa, unidentified
MSTVYVLNKDGKPLMPTTRGGHVRHLLKEQKARVVTSNPFTIQLLYETDDVVQPLYLGIDPGRTNIGVAVVKADGTAVFTAHLETRNKEIPKLMKKRKNSRRARRTNGRRCRRQRRAKANGTISKKCVKQDTAQNGSVSKRAKKIGVIKRHLPGCEKEVLCIGIKNKEAKFSNRVRPEGWLTPTANQLLQTHINLVKKIQKFLPISDVVLEVNKFAFMQLDNPNIQKWQYQQGPLYQKANLEEAVSEMQEHHCLFCKKPIAHYHHVVPQSENGSNTIGNIVGLCTKHHDLVHKDTEWQKKLAKKKTGLNKKYGALSVLNQIIPALTKELSSLFPKHFFATNGKSTYDYRAAHGVSKDHWLDAYCIACSVLADDVCDNNINSHVPYELKQFRRHDRRALHKENMSRVYTLNGKSVATNRHKATEQTTDSLEEFRQCQPDDVCKLKVKEHYPEYRNPKRNFPGCVFLVGKHTHVMQGTSGSHNGKADGYYDTNGNSYSSGECKFVAKNEGIVFA

SEQ ID NO: 18341 - protein, 470 aa, unidentified
MSVFVVGLNGCRLMPVSERKARLLLKGGKASVYRKVPFTIKLNYKTGSTVQPGYLGIDTGSQHIGVSVVRQDGTVLHKEEIGLRDSMSKRKLLESRASLRRGRRYRKTRYRHPKWKPKTKRIYSEKADRKGRHWKKQKNTFTSKRQAGWLPPSLQSKTDHHIQWIRKLLHLLPEGYRLSIELGRFDPARMKDPGIHGELYQKGPQYDYENVRAYVLARDGYTCRVCKKKGGKLHVHHILYRSRGASDDPKYMAAVCSNCHTTENHLPGGILYQWMQDQKKFTRGLRDATFMNILKKRLRRAFPDAVFTYGNITKADREKLGLPKSHGNDATAIALVKTGVTSVRDEEPVIHIQQVRRKKRSLHEETPRKGRKEPNRTASRNDKNTRSVTVSKGSGKKKVSMTACLFDRVELDGKKGWITGFTGTSCYVKDKEDNYICTSPKYKQVSISKLRILHHCGNWVIGAEKPLGKG

SEQ ID NO: 18342 - protein, 480 aa, unidentified
MKGKNMVITLDKNKRPLGFMSERRCRILLEKKRAVLYRYFPTIVILKDVDARKLSGLSSYRIKIDPGAKYTGIAIVMDDTNEFMYAMQIEHRGEQIKKNLDTRRGARRNRRSRETGYRRPKWGNRCTAKEQRQSYDSRRDENWLPPSVKSTADNIISWIRRLCRWINITNCSIESVRFDTQLMENPEIEGVEYQQGTLYGYEVKEYLLEKYGHTCQYCGGKSSDPILEWEHMLPRSRGGSDRLKNASLACHNCNQDKGNHTLEEWQTILQDRIPKERGKQKELDQIRQKFVQQVMEGKTPVKGLRYAAWVNSSRGYLQRHLYLRFPELECSSGGRTKYNRNVLKYPKEHHYDALCVGEIPEDGFVDRTNGYYLYAKATGRGTRLRGQINQCGVIIRKWMDRSKTAFGFQTGDLVVADVPKDTKYKYKGHFSGRVMIRKSGSFDIRTLSGELVTVNAKFCRLLQNNSGYQMMIKRAIPLGN

SEQ ID NO: 18343 - protein, 415 aa, unidentified; identical to SEQ ID NO: 15940

SEQ ID NO: 18344 - protein, 447 aa, unidentified
VPAYRFKHITKKEVPYMVYVLDIDGQPLMPTSRHGKVRRLLNSHLAKVVKRCPFTIQLLYQSTKETQPVSLGVDAGSRHIGLSATTEREVVYQEELVPRNDIVKLLSARRALRRSRRNRKTRYRKPRFNNRVHSKHKGWLAPSVEVKIQEHITAIKRICQILPIFDIHVETAEFDLQRLKAMEEGRSLPLGTDYQLGEQYDFYNTRQYVLHRDEYTCQCCGTHDNNVKLHVHHIESRQTGGDAPNNLITLCEHCHKLLHAGKTILPKDKKRGRSYRDATFMGVMRKTLLERLKKEIDVPVAGTYGYITKYWREKTGLEKSHINDAICISKHPYAKSLDTYYLTKAVRHHNRQIHKSNFSKGGIRKRNQAPYLVKGFRLFDKVLYQGKSYFIFGRRATGYFDIRTLDGTKVNKGSIKYKKLRIQDTTKAYLKGARAIPHMNKFTCVLA

SEQ ID NO: 18345 - protein, 544 aa, unidentified; identical to SEQ ID NO: 12025

SEQ ID NO: 18346 - protein, 472 aa, unidentified; identical to SEQ ID NO: 4432

SEQ ID NO: 18347 - protein, 406 aa, unidentified; identical to SEQ ID NO: 4271

SEQ ID NO: 18348 - protein, 424 aa, unidentified
  source 1..424: note = Lachnospiraceae bacterium
LRVFVKNLRGQSLMPCSQRKARLLLKNKKAKIYCYNPFTIQLLYATGETVQKCNIGIDTGSRHIGLAITSEKKVLFKGEINLRQDVKSNLDTRRIYRRNRRNRKTRYRKARFLNRVKSKKQNWLPPSIESKINHTFNWIDKLENLAADTKLHIEAGKFDIAKMIRPDIQGKDYQQGQCYGYFDTRYFVFARDGYTCQCCKKKNKILNTHHIIYRSNGGTDRADNLITVCTDCHTSENHEKGGILYEWQQRHKKVKQYKEPPFMNIIRKRILKKYPDAVICYGSQTTPKRKDMNLDKTHYNDAIIISGIEDIKENPDEWLLIKQFRKKKRSLHEANARKGRKEPNITQKRNSKNTSYYKGMYLNDYVEVFGQKGYISGFTNGGVYVKNTNDGYITMPGKKYKQVSISNIVRICHNNNWQYYMQNI

SEQ ID NO: 18349 - protein, 277 aa, unidentified; identical to SEQ ID NO: 16282

SEQ ID NO: 18350 - protein, 441 aa, Sulfobacillus sp.; identical to SEQ ID NO: 4231

SEQ ID NO: 18351 - protein, 490 aa, unidentified
MYVVYVLNRQGKPLMPTKRFGHVRRMLKTGKAKAISTKPFVIQLQYESTDFIQPLYGGTDPGRTNIGEAVLNGKGEVVYAAHVTTRNKEIPKLMADRAAHRRASRRGERLRRKRRAKANGTMTYFPEGRKLPGYKDGVLELKDIINTESRFNNRKRPAGWLTPTARQCIQTHLNMVQNICKILPVTDWTLEYNRFAFMRLEDDSVRGWDFQNGRLKGYASKEDYIYALQGGVCICCGASIEHYHHIKPRHKGGSDTPENLVGLCSVCHTEIHTGKRSLDKIGKYKEYAGTSIVNIAIPFIWDGIVKMFGDKAHICEGQETAELRKANNLPKEHFADAVCIAGIGSGIIPQYDDNQPFELRQFRCHDRSRIHSQAERTYLDGKTVVAKNRKPRFEQKGDALSDLQSKMTKEHGELAARRVVSKLVVKKSYRRYNAYERIKPSAVFVFNNKKYLLSGQLTNGRYYRAFGEGTKNFPSRNCELVSFGYSLTYM

SEQ ID NO: 18352 - protein, 492 aa, unidentified; identical to SEQ ID NO: 4486

SEQ ID NO: 18353 - protein, 518 aa, unidentified; identical to SEQ ID NO: 2751

SEQ ID NO: 18354 - protein, 429 aa, unidentified
MLVYVLKQNGQPFMPTSRFGKVRRLLKEGKAKVIRREPFTIKLLYRPETDVIQECYCGVDTGSKHIGVAVVGNDKVLYQSQTELRSDIKKKMNRKRASRRNRRNRKTRYRKPRFLNRRNSIREDKLPPSVQHKVQTHINEIEFCKKILPVSDLILEVSQFDTALMKNPGLMNEKVKHWGYQKGFNYGYSSRRSAILHRDNYTCQCCGKKNCRLEVHHIKFKSNGGTDDEENLITLCTDCHKGVHAGTVVLNKKPKKSKNLKYATHMNVIRSQLLKEYPDAIETFGFVTSENRNHLNLPKDHYIDACVIASGGLEFKELDVIYRKRRVSIQDRVLTKGVRGEQKLPIGKIFGFKKFDKVEYLGETCFIKGRRSSGAFVLMDIDNNSIDFRDRGGKQNPSYKCIERVSTRKSVLCVSKRIEREVRLIPILS

SEQ ID NO: 18355 - protein, 465 aa, unidentified; identical to SEQ ID NO: 3070

SEQ ID NO: 18356 - protein, 424 aa, Petrotoga sp.; identical to SEQ ID NO: 8893

SEQ ID NO: 18357 - protein, 429 aa, Parasutterella sp.; identical to SEQ ID NO: 3656

SEQ ID NO: 18358 - protein, 416 aa, unidentified; identical to SEQ ID NO: 9947

SEQ ID NO: 18359 - protein, 414 aa, unidentified
MPCSPAKARLLLKEKKAIVKRRTPFTIQLTIATGETKQPVSLGVDAGYKHVGLSASTEKAELYASEVELRQDVSDLLSARRALRQSRRNRKTRYRAPRFDNRIRTKRKGWLAPSVENRINAHLSRIETVIRLLPVTKISVETTSFDMQLLKNSDIAGKEYQESEQLGFWNVREYVLFRDGHVCQHCHGRSKDPVLNVHHLESRRTGGDSPGNLITLCETCHKELHRGEITLKAKRGQSFRAETFMGIMRWEVLDRLKASHPKLEVQNTYGYRTKHARIVNGIAKSHCADAFCIAGNLGAERLGEFLFQKQTRRNNRQIHKLSILKGGIRKRNQVPFEVKGFRLFDKVACKGEEGFIFGRRSSGYFDVRKLDGTRISAGISYKKLRLLEKRQTYLTEIRKEEALPPLPEGRGLRA

SEQ ID NO: 18360 - protein, 428 aa, unidentified
MLVYVVDKNGQPLMPTHNGAKVRVLLKHKRAKVVSKCPFTIKLLYESTNFTQPLTLGIDTGSKYVGSAIINDVTAEILYESQLELRDDIKSKIDKRRQFRRVRRNKLRYRPSRFDNRKASKRKNHYTPTLISKFQGHTREIEFIKSILPVNDVVLEIGEFDTHLLQDSTLAYHKWDYAKGELYQQENFKQAAKARDGYKCQCCGKKNCRLEVHHLLPRSRGGSDKLANLITLCSDCHHLAYSSEEQLLAFQKRFGKKSKSVLSYATQMNILRSMLQKEYPDAELTYGFITKEIRRVFGLDKSHTIDACCIASRGVLFINENSNKYKKKCVPKGNYARTSVKGGRFVFLPSGKISGFKRYDKVLYNNKEYFVTGRMSNGYITLTDIDGNKPQVESVKRSTGEKYLSLAKIKVSLVKKISSAKTCIYTSV

SEQ ID NO: 18361 - protein, 413 aa, unidentified; identical to SEQ ID NO: 3220

SEQ ID NO: 18362 - protein, 516 aa, unidentified; identical to SEQ ID NO: 5652

SEQ ID NO: 18363 - protein, 627 aa, unidentified
  source 1..627: note = Erysipelotrichaceae bacterium
MQELEACICAVGDTMNAPTALVQVVALLQFMVKFRVHGIRNTVTLLPQKVPHWMHSNAVYDSELSFQKDVTVYMYVRVIAKDGTPLMPTRRCGNVRHLLETGMAVAIRTKPFTIRLKYETSKYVQALYAGIDTGRENIDSAVSKENGENVYLADTRSNNGTVHSKMYDRAGFRRKRCRHDRQNKQRKAKFDGTEMKKGDADKVRTTHDCISRKVSYPVAEKSVTHKVIQGKEGKFNNRKHPDGWITPSAKQLVQITMNEVKFMCDTMPIRQLSVERVSFDFQKLANVNIRAWEYGKGPLYGYRSYKDYFCDEQKGKCPFCGEDIAHYHHIMPRHRRGTDTVRNIIGVCESCHEKIHSGQITDEMLHEVKDGVAESFEVGLLNSVMPALIDAMKQFCDARNIRLVVMDGRTTSETRNRYHIRKDHCTDAYCISLAGRNIDPADVKLDDFIFMKRRFKKKSKNIINTLNQRVYYDGKKPVAYNRHRAMDQKTDSLEEYMTKYRRTHTGAETDKHFRSLTVRPAKRTYTFHKNGTIAAVHAGDVVRYVKYNKTYGNTKIDTFVALSCEMFGEGHVKYGNGTQGRKLKFCKTIASGALQCVGIEKTDTYLREVALEEAKRRAARVRRKRTG

SEQ ID NO: 18364 - protein, 458 aa, Lactobacillus sp.; identical to SEQ ID NO: 4474

SEQ ID NO: 18365 - protein, 512 aa, unidentified
MSTVYVLNKDGKPLMPTTRCGHVRHLLKEQKARVVASKPFTIQLLYKTNDVVQPLYLGIDPGRTNIGVAVVKADGTAVFTAHLETRNKEIPKLMKKRKDSRRARRTNGRRCRRQRRAKANGTISKKCVKHDTAQNGSVSKRAKEIGVIKRHLPGCEKDVLCIGIKNKEAKFSNRTRPEGWLTPTANQLLQTHINLVKKIRKFLPISDAVLEINKFAFMQLDNPNIQKWQYQQGPLYQKANLEEAVSEMQEHHCLFCKKPIAHYHHVVPQHKNGSNTIDNIVGLCTKHHDLVHKDTAWHEKLTKKKTGLNKKYGALSVLNQIIPALTKELSSIFPKHFFVTTGKSTYDYRAAHGVSKDHWLDAYCIACSVLPNDVCDSGINNRVPYELKQFRRHDRRALNNENMSRVYTLNDNVVATNRHKATKQITDSLEEFRQNHPDDVCKLKVKEHHPTYRNMNRNYPGSVFLIGKQVHVMQGIAGSKDGEATTYKDTNANSIAAGKCKFVAKNSGILFV

SEQ ID NO: 18366 - protein, 395 aa, unidentified
VVRRTPFTIQLTIATGESKQPVSLGVDAGYKHVGLSASTEKAELYASQVELRQDITDLLSARRALRRARRNRKTRYRAPRFNNRIRTKRKGWLAPSVENRINAHLSRIEAVLRLLPITKITVETASFDMLLKNPDIAGKEYQEGEQLGFWNVREYVLFRDGHVCQHCYGRSKDPVLNVHHLESRRTGGDSPGNLITLCETCHKALHRGEITLKAKRGQSFRAQAFMGIMRREVLNRLKASHSELEVNNTYGYRTKHARIVNGIDKSHCADAFCIAGNLGAERLCEFFFQKQTRRNNRQIHKLSILKGGIRKRNQAPFEAKGFRLFDKVACQGEEGFIFGRRSSGSFDVRKLDGTRISAGISCKKLRLLEKRRTYLTEIRKEEALPPLPEGRGLRA

SEQ ID NO: 18367 - protein, 292 aa, unidentified
LSRIEAVLRLMPVTKITVETASFDMQLLKNPDIAGKEYQEGEQLGFWNIREYVLCRDGHVCQHCYGRSKDPVLNVHHLESRGTGGDSPGNLITLCETCHKALHRGEITLKAKRGQSFRAEAFVGIMRWEVHNRLRALHPGIEVSNTYGYRTKHARIANGIAKSHCADAFCIAGNLGAERLCEFFFQKQTRRNNRQIHKLSILKGALRKRNQAPFEVKGFRLFDKVACQGEEGFIFGRRSSGFFDVRKLDGTRISAGISCKKLHLLEKRRTYLTEIRKEEALPPLPEGRGLRA

SEQ ID NO: 18368 - protein, 432 aa, unidentified; identical to SEQ ID NO: 16069

SEQ ID NO: 18369 - protein, 420 aa, unidentified
MFVYVINKHGKPLMPTNPRKARILLKQGKAKVVKRTPFTIQLIYGSSGYTQPVTLGVDAGSKTIGVSATTEKEVLFEAEVIPRNDIVNLLATRSQLRRSRRSRKTRYRQPRFLNRKKTKGWLAPSVQNKIQTHIKTVALAHSILPVTKIVVEVAQFDIQKIKDPNVQGKDYQQGDQLGFWNTREYVLWRDGHKCQGKKNCKHDILSVHHIESRKTGGNAPSNLITLCEFCHGDYHAGRLVLDIKRGQAFRDAAFMGIMRWVLYDRLKELYANVSLTYGYLTKYVRIHNGLEKSHRVDARCISGNPSSVPADNWYCLKHVRGQNRQLHKSNPKKGKRQANKAPRYVYGFQLFDKVLFKDQECFIFGRRTSGFFDLRLLNGVKVSASANVKKLRLLEKCKTLLIERRQGDFLPPLKREVSIA

SEQ ID NO: 18370 - protein, 517 aa, Leptospirillum sp.
MLPQSRALEAADADNREGQDETVGGKGAIPKPVANISEGRRFARSALRPQGQCNVRFDGGFVQVFVLDKKKKPLMPCHPARARELLREGRAVVHRIAPFTIRLKDRIGGETQPIRVKLDPGSKTTGLAVVREEETDGETTAHVLFQAEIHHRGSAIKKRLDQRRSFRRRRRSQLRYRTPRFDNRTRPDGWLPPSLRHRVDTTLAWVERLRRLVPVSELSQELVRFDMQKIENPEISGVEYQQGTLAGYEVREYLLEKWGRTCAYCGASDMPLEIDHIHPRSLGGSERVSNLTLACRSCNLKKGNRPVGEFLAKTPERLSTILARAKAPLKDAAAVNTTRLALFQALKATGLPVETASGGRTKYNRTRLGIPKGHSLDAACVGKVDRIEGWNRPCLSIKSTGRGSYQRTRLDAFGFPRGSLTRTKAHFGFQTGDRVRAIVTKGKKTGTYAGRVAVRSSGSFNIQTGSGVVQGISCKDCRLLQRADGYGYSIHPIIEKGEAGEALPLPGMNAGVSRARG

SEQ ID NO: 18371 - protein, 462 aa, unidentified; identical to SEQ ID NO: 15460

SEQ ID NO: 18372 - protein, 424 aa, unidentified; identical to SEQ ID NO: 8578

SEQ ID NO: 18373 - protein, 420 aa, unidentified
MQYVYVLNKHGEPLMPCSPGKARLLLKQQKAHVVKRTPFTIKLLYGGAGYKQPITLGVDAGSKHVGLSASTEKRELYREEFTPRNDVVDLLSTRKQNRRSRRNRKTRYRASRFDNRVHGKHKGWLAPSVEVKIQEHITVIKRTCRILPVALVRVETAEFDTQRLKAMLEGKPLPVGTDYQLGEMCDEYNVRQYVLNRDHHTCQCCGAHTTTKKTVKLHVHHLESRKVGGNAPSNLITLCTTCHDALHKGKVSLDNKKRGKPMRDAVFMGIMRKTLMARLREELPIPVQGTYGYITKMRREQNDIKKSHVNDARCISKHPLAEPCSVCYRTKAIRHHNRQTHKANFSKGSIRKRSQMPYVVEGYRLWDKVLYKGQECFVSGRRASGSFTLKKLDGTRISKGVTFKKLRLLEPATNYLIERM

SEQ ID NO: 18374 - protein, 422 aa, unidentified; identical to SEQ ID NO: 7962

SEQ ID NO: 18375 - protein, 404 aa, unidentified
  source 1..404: note = Clostridiaceae bacterium UBA4052
MPTSRHGKVKHLLKDGKAKVVRRTPFTIQLLYDSPEYTQPITLGVDSGSKVVGLSATTEKKELFVSEITLRDDIPELLSTRRQNRRTRRNRLRYRMERFLNRTASKKEGWLAPSVKHKVDSHLKVIENVHRILPISRIVIETASFDIQKIRNPEISGTEYQQGEQLGFWNIREYVLWRDNHECQHCHGKSKDRILNVHHKESQKTGGDSPGNLVTLCETCHKSYHAGRIQLKLTPNKSYRDASFMGIMRWYVYNSLKELYPEVSMTYGYITKTNRIMNNIEKTHSADAYCISGNMNAIRSNETYNQAFKRKYNRQIHKANFLKGGKKKLNQSEYEVKGFRLFDHVRYKDEDCFIFGRRTSGYFDLRKLDGSVVHRSASFKELKLLKRQNTILIERKGCNGVLLS

SEQ ID NO: 18376 - protein, 424 aa, Moorena sp.; identical to SEQ ID NO: 17353

SEQ ID NO: 18377 - protein, 414 aa, unidentified; identical to SEQ ID NO: 5310

SEQ ID NO: 18378 - protein, 470 aa, unidentified
MSVFVVGLNGCRLMPTSERKARLILNDGKASVYRKVPVTIKLNYKTGRTTQPGYLGIDTGSQHIGVSVVREDGTVLHKEEIGLRDSMSKRKLLEAKASLRRGKRYRKTRYRHPKWRPKTKRVYCEVPDRKGRHWQKKKITFTSKRPKGWLPPSLQSKTDHHIRWIKKLQDLLPEGYRLSIELGRFDPARMKNPEIHGDLYQKGPQYDYENVRAYVLDRDRYTCQICKKKGGKLHVHHILYRSHGATDDPQYMVTVCSDCHSAQNHLPGGILYQWMQEQKRFSRGLRDATFMNILRKRLIRAFPEAVFTYGNVTKVDREKLKLPKSHGNDATAIALVKTGITAVKDKESVICIQQVRRKKRSLHEETPRKGRKEPNRTAARNNKNTKAVTVTKRQNKKKVSMTGCLFDRVELNGKKGWISGFTGKSCYVKDADDQYLSTSPKYKQVSLSKLRILHHCGNWIIGAKKTLGKG

SEQ ID NO: 18379 - protein, 416 aa, unidentified
MVYVLNIQGNPLMPCKEAKARKLLKNSLAKIIKRTPFTIQLLFECENKTQDITLGIDTGSKTIGVSASTEKQELYSAEVVLRDDIVDLISTKRQNRRTRRNRLRYRKPRFNNRIKFKKDGWLAPSILQKIETHLNVIKKIHKILPISKIIVETASFDIQKIKNPNITGVEYQQGEQLEFWNVREYVLHRDGHTCQHCKGKSKDKILNVHHIESRKTGGDSPSNLITLCETCHKKYHNEEIKLKVKRGQSFRDSAFMGIMRWAFYEKLKETYQNVKMTFGYITKNTRISNNLPKEHCIDAYCIAGNLKAKLMDSYFYQIKKRCQNRQIHKANFLKGGRKKLNQAPYIVKGFRLFDKVSYQGKPYYIFGRRSSGAFDVRDLSGNKVNKGSINCKYLKLLETRKYYLTERRERAIPPND

SEQ ID NO: 18380 - protein, 427 aa, unidentified; identical to SEQ ID NO: 9660

SEQ ID NO: 18381 - protein, 430 aa, Desulfobacter sp.
LNVFVLDTNKKPQNPVHPAKARLLLTEGKAAVFRQFPFTIILKENVLDVASNPLRIKIDPGSRETGIAVINDDSGEIVFAMELRHRGQQIKNNLESRRAIRRSRRNRKTRYRKPRFDNRTRAEGWLPPSLKSRVHNIETWVNRLCRFCNIQAISMELVRFDMQKIQNPEISGVAYQQGELMGYEVREYLLEKWDRTCAYCGKTDIPLEIEHIVPKSKGGSNRVSNLTLACTACNRKKGNKPLEQFLSRKPRLLKRIQKQSKVPLKDAGAVNTTRWDLFRTLKKTGLPVETGSGGLTKFNRTTRGLHKTHWLDAACVGESTPEKMFQIDKTVLIVKADGHGSRQMCRLNKFGFPRTTAKSTEKQVKGFQTGDIVKAVVTSGKKVGTYTGRVAVRKSGSFNIKTVDKTVQGISWKYCRLLHASDGYSYNTTC

SEQ ID NO: 18382 - protein, 287 aa, unidentified
QEHITVIKHICRILPITLVRVETAEFDTQRLKAMLAGKPLPVGTDYQLGEMYDEYNVRQYVLKRDNYTCQCCGAHTTAKKTVKLHVHHLESRKVGGNAPSNLITLCTTCHNNLHKGKITLDGKKRGKTLRDAAFMGIMRNTLLTRLRNELNIPVQNTYGYITKLLREQNDIKKSHVNDARCISKHPLAKPCSVCYRTKAIRHHNRQIHKAKILKGGIRKANQAPYIVKGFRLWDKVLYNEQECFISGRRSSGYFALRKFDGTTITNSISFKKLRLLEPATNYLIERK

SEQ ID NO: 18383 - protein, 406 aa, unidentified; identical to SEQ ID NO: 2703

SEQ ID NO: 18384 - protein, 430 aa, Desulfobacter sp.
LSVFVLDTNKKPQNPVHPAKARLLLTEGKAAVFRQFPFTIILKENVLDVASNPLRIKIDPGSRETGIAVINDDSGEIIFAMELRHRGQQIKNNLESRRAVRRSRRNRKTRYRKPRFDNRTRAEGWLPPSLKSRVHNIETWVKRLCRFCNIQAISMELVRFDMQKIQNPEISGVAYQQGELMGYELREYLLEKWDRTCAYCGKTDIPLEIEHIVPKSKGGSNRVSNLTLACTVCNRKKGNKALEQFLSRKPRLLKRIQKQSKVPLKDAGAVNATRWDLFRTLKKTGLPVKTGSGGLTKFNRTTRGLHKTHWLDAACVGKSTPEKMFQIDKTVLIVKADGHGSRQMCRVNKFGFPRTTAKSTEKKVKGFQTGDIVKAVVTSGKKVGTYIGRVAVRKSGSFNIKTVDKTVQGISWKYCRLLHASDGYSYNTTC

SEQ ID NO: 18385 - protein, 424 aa, unidentified; identical to SEQ ID NO: 5641

SEQ ID NO: 18386 - protein, 442 aa, unidentified; identical to SEQ ID NO: 7111

SEQ ID NO: 18387 - protein, 419 aa, Moorena sp.
MQNYVFVIDTNFQALNPISPKKARKLLDKGKAAVFRMYPFTIILKTAIEHPLLSPCQIKIDPGSKFTGFSLVQDNQVIWAMELQHRGSLIKKKLEARKALRSSRRGRNTRYRKPRFINRRRNDNWLPPSLEHRILTIQSWVERLIKFAPVSEIWIERVKFDPQKMSNPEISGIEYQQGSLAGYEVREYLLEKWGRKCTYCGKKDIPLQIEHIKPKSKGGSNRVSNLCLSCQKCNQKKGNKSVEDFLKNKPGLLQKIKSLAKKPLQDSAAVNATRNKLVKVMNGILPVITGTGAQTKYNRTRLGLPKQHWIDAACVGEVEFVELLTLQPLIVTCKGQGGRQKAALNKYGYPIRHNPLKPIKGWCSGDIAKNLLTGDFGRVNPRSSSNSFNFIVPGRKAVNIHCKNLIRVHRKDGYIYSFS

SEQ ID NO: 18388 - protein, 450 aa, unidentified; identical to SEQ ID NO: 2935

SEQ ID NO: 18389 - protein, 434 aa, unidentified
VVLMDAWDIIVILNKRGKPLMPCSPAKARLLLKEKKAVVVRRTPFTIQLTIATGETKQPVSLGVDAGYEHVGLSASTEKAELYASEVELRQDVSDLLSARHALRQSRRNRKTRYRAPRFDNRIRTKRKGWLAPSVENRINAHLSRIEAVLRLLPVTKITVETASFDTQLLKNPDIAGKEYQEGEQLGFWNVREYVLFRDEHVCQHCHGRSKDPVLNVHHLESRRTGGSSPGNLITLCETCHKALHRGEIKLKAKRGHSFRAQAFMGIMRWEVLNRLKASHPELEVNNTYGYRTKHVRIRNGIAKSHCADAFCIAGNLGAERLGEFFFQKQTRRNNRQIHKLSILKGGIRKRNQAPFEVKGFRLFDKVACKGEEGFIFGRRSSGFFDVRKLDGTRISAGISYKKLHLREKRQTYLTEIRKEEALPPLREGRGLRA

SEQ ID NO: 18390 - protein, 477 aa, unidentified; identical to SEQ ID NO: 2707

SEQ ID NO: 18391 - protein, 424 aa, unidentified; identical to SEQ ID NO: 4955

SEQ ID NO: 18392 - protein, 470 aa, unidentified; identical to SEQ ID NO: 7284

SEQ ID NO: 18393 - protein, 406 aa, unidentified; identical to SEQ ID NO: 3795

SEQ ID NO: 18394 - protein, 439 aa, unidentified; identical to SEQ ID NO: 3280

SEQ ID NO: 18395 - protein, 425 aa, Arthrospira sp.; identical to SEQ ID NO: 3231

SEQ ID NO: 18396 - protein, 429 aa, unidentified
MELSEMSNYAFILDSNKNPWQPCHPSVARKLLYKGKAAVFRRYPFTIILKEVKTNIVSQPIELKIDPGSKTTGIALVCNSQVVWGGELTHRGFQIKDKLQSRANCRRGRRNRNTRYRKPRFLDPSRAQDTRAKGWLTPSLQHRVLTTMTWVKRLCKYAPINSFAEELVRFDTQQIDNPEITGTEYQQGTLLGYEVREYLLEKWGRSCTYCDKKDTPLEIEHIVPRASGGSNRISNLCLACHSCNTKKGTRSIEEFLKKKPDLLNRIKKQAKAPLRDAAAVNSARWDLYNQLKKTGLPVAVASGGKTKYNRIRLGLTKTHWLDAACVGEVASLKVLTKKPLLIKARGQGGRQKCAVNKFGYPIRHNPLKPIMGWQTGDIARFNGVVGRLTTRSNGRFYLTTATKTVTNLKPKEVALIKPVQRKDGYEYTG

SEQ ID NO: 18397 - protein, 464 aa, unidentified
LVFVLNYKKKPVDMCSNAEARILLKKGYAVVHKAHPFTIRLKRDADYSQETEKEYKLKIDPGSKHTGVAIVDDEDSVVFLGEIEHRGSQIVALLETRSNVRRNRRSRKTRYRRCKFVNYYLKKDSKYKADSNRPKGWFPPSIESIKNNIVNFLKKYKKLCNITSVSIESVKFDSQLLENPDISGVMYQQGTLFSYELREYLLDKYGHNCQYCSGESKDTRLEIEHKVPKSRGGSNRVDNLTIACRSCNQDKSNLTLEKYLNRLKNAKSKNKLTQKRINNITDILDKGTIHKHQRYSAWVNSYRLKLIEEIKPLVNDVELSTGGRTKYNRTNLNLPKTHYYDALCVGEVPENFNFKTDKVLEIKAYGRGSRFRGRTNSCGIITKNLPRQKNFFGFQTGDIVKANVAKGKKAGSYYGRVAVRSSGYFNIQEKNKTTQGIKHTDCKIVQRSDGYGYNLKDVEILKDV

SEQ ID NO: 18398 - protein, 472 aa, unidentified; identical to SEQ ID NO: 7536

SEQ ID NO: 18399 - protein, 406 aa, unidentified; identical to SEQ ID NO: 6897

SEQ ID NO: 18400 - protein, 465 aa, unidentified; identical to SEQ ID NO: 3070

SEQ ID NO: 18401 - protein, 398 aa, unidentified
VRHRTPFTIQLLYGSTGYTQEVILGVDAGSKTIGLSAATETEELFSAEVKPRNDVVELMSARRQFRRARRNRTTRYRKPRFDNRVRSKHKGWLAPSVEVKIQEHMTAIRRACAILPVSKVVVETAEFDLQLLKAVAEGKPVPQGEDYQKGEMYGHYNVRQYVLWRDSYTCCICGVHGSVRKGVPLHVHHLESRRVGGDAPDNLVTLCTACHDKLHKGIIMAADIKKRKRRSTRDATFMGIMRMTLLRRLREQLPVPVVETRGYITKATRENLLVLPKSHANDALAIAHGPQGFRAEHLPNIRQADRLYTIRPVRHHNRQLHKATILKGGVRKTNQAEKYICGFRLYDKVLYNGIECFVWGRRTSGSFLLRQLNGEKVKDGVSYKHLKLLERSQSYLVA

SEQ ID NO: 18402 - protein, 404 aa, unidentified
LMPTERHGKVCRMLKSGMAKVVKKCPFTIQLQYESERNVQPVSLGVDAGSKHIGISATTKTKVLYESDVELRDDIVKLLATRRQLRLSRRSRKTRYRPVRFDNRKRKEGWLAPSIRQKIGSHLTVVANVCKILPINQIIVETASFDIQKIKDPEIQGIEYQQGEQMDFWNIREYVLFRDGHTCQCCKGRSKDKILNVHHIESRKTGGNAPNNLITLCETCHKGYHNGTVILPKNIKHGMQFKDAAFMGIMRWTFYNTLKEQYEPDIPVSMTYGYLTKNTRIEHGLPKEHYIDARCISGNPDAVSDGTYYYQKKVRCHNRQIHKQTILKDGVRKSNQAEYLVKGYRLFDKVRYQGREYFIFGRRKSGFFDIRTLSGEKVNKGSISVKKLTFADTRKNYLTERRTV

SEQ ID NO: 18403 - protein, 434 aa, unidentified; identical to SEQ ID NO: 7738

SEQ ID NO: 18404 - protein, 430 aa, Desulfobacter sp.
LSVFVLDTNKKPQNPVHPAKARLLLTEGKAAVFRQFPFTIILKETVLDVASNPLRIKIDPGSRETGIAVINDDTGEIVFAMELRHRGQQIKNNLESRRAIRRSRRNRKTRYRKPRFDNRTRAKGWLPPSLKSRVHNIETWVNRLCRFCNIQAISMELVRFDMQKIQNPEISGVAYQQGELMGYEVREYLLEKWDRTCAYCGKTDIPLEIEHIVPRSKGGSNRVSNLTLACTACNRKKGNKPLEEFLSRKPGLLKRIQKQSKVPLKDAGAVNTTRWDLFRTLKKTGLPVETGSGGLTKFNRTTRGLHKTHWLDAACVGKSAPEKMFQIDKAVLIVKADGHGSRQMCRVNKFGFPRTTAKSTEKKVKGFQTGDIVKAVVTSGKKVGTYTGRVAVRKSGSFNIKTVDKTVQGISWKYCRLLHASDGYSYNTTC

SEQ ID NO: 18405 - protein, 413 aa, unidentified; identical to SEQ ID NO: 3587

SEQ ID NO: 18406 - protein, 512 aa, unidentified
MSTVYVLNKDGKPLMPTTRGGHVRHLLKEQKARVVRTNPFTIQLLYETDNLVQPLYLGIDPGRTNIGVAVVKTDGTAVFTAHLETRNKEIPKLMQGRKKARRARRTNGRRCRRQRRAKANGTISKKCVKQATAQNGSVSKRANEIGVIKRHLPGCEKEVLCIGIKNKEAKFSNRTRPEGWLTPTANQLLQTHINLVKKIQKFLPISDVVLEVNKFAFMQLDNPNIQKWQYQQGPLYQKASLEEAVSEMQEHHCLFCKKPIDHYHHVVPQHKNGSNTIGNIVGLCAKHHDLVHKDTTWQKKLAKKKTGLNKKYGALSVLNQIIPALTKELSSLFSKHFFATNGKSTYDYRAAHGVSKDHWLDAYCIACSVLPNDVCDSDINNRVPYELKQFRRHDRRALHKENMSRVYTLNGKSVATNRHKAIKQTTDSLEEFRQRQPNDVCKLKVKEHHPEYRNPKRNFPGCVFLVGKHTHVIQGTSGSHNGKADGYYDTNGNSYSSGKCKFVVKNEGIVFT

SEQ ID NO: 18407 - protein, 442 aa, Sutterella sp.; identical to SEQ ID NO: 3791

SEQ ID NO: 18408 - protein, 418 aa, unidentified; identical to SEQ ID NO: 5724

SEQ ID NO: 18409 - protein, 420 aa, unidentified; identical to SEQ ID NO: 3004

SEQ ID NO: 18410 - protein, 612 aa, Streptomyces sp.; identical to SEQ ID NO: 13256

SEQ ID NO: 18411 - protein, 431 aa, Ktedonobacter sp.; identical to SEQ ID NO: 3598

SEQ ID NO: 18412 - protein, 443 aa, unidentified
  REGION 1..443: note = IscB polypeptide
MVFVLSSDKKPLNPCNPARARILLKQGKACVFKQYPFTIILKSRWSFMSETDEFRLKIDPGSKVTGIAIINETTGKVVWAGEVQHRGYRIKEKLESRSASRRSRRNRHTRYRQARWMNRVRQGQMRFSYTSRKGKGWLPPSLCSRIFNVETWIRRLMKLCPIKAFSLESVKFDTQIMENPEIEGIEYQRGTLYGYELKEYLLEKWGHSCVYCGEKDVPLQIEHIKPKSMGGTNRVSNLTIACEKCNIRKNTMTVEEFLEKDRVARNYQAQLKKEHKSGFFKLYSCREFLKDVAAVNSTRKALYQKIKIYNLPIECGSGGLTKYNRVNRGLEKTHWIDALCVGKSTPDVIDVMGITPLNIKAVGHGSRQMCSVDKYGFPASKAKAGKKFFGYQTHDIVKSGNNIGRIKGVRKTGSFTMEGKDKDLNVSQKKISLTQHADGYSYR

SEQ ID NO: 18413 - protein, 442 aa, unidentified; identical to SEQ ID NO: 4533

SEQ ID NO: 18414 - protein, 494 aa, unidentified
MTMVYVQNKDGKPLMPTTRYCYVRLLLKEKKARVVCTTPFTIQLNYDTPDITQDLILGIDPGRTNIGVAVVKEDGQCVFSAHLETRNKDVPLLMKKRAGFRKQHRTLDRRRKRQRRAKATGNTVKNETIERLLPCYQRPIVCHYIRNKEARFNNRSRPAGWLTPTANHLLQTHINLIAKVGKFLPITKVVVELNRFAFMAMDNPNIRRWEYQQGPLYGLGSVEDAVYAQQDGHCLFCDKPIDHYHHVVPRHKGGSETLANRCGLCAEHHDLVHKDKAWAEKLVTRKGGMNKKYHAQSVLNQIISFLMEYLGRETPYDVYATDGKSTKGFRIAKNVPKEHYTDAYCIACSILDANTKVSTPAEPFELKQFRRHDRQSCIRQMVDRKYILDSKVVATNRHKAIEQKSDSLQEFREVYGDAAVSQLTVRPHSPQYKDMTRIMPGAVMDFNGTIGVMQCSGGRNNGKVEFFKSTKGNKTPPKKCVLLAQNAGMVFIPA

SEQ ID NO: 18415 - protein, 454 aa, unidentified
LDTVAVISASGKKLMPTNSYRARGLLKSKRAVIHKYRPVFTIKLVDRTNGYTQPIEYKCDTGYQNIGISICSDTKEFVNEQRDLLKDEVKKHSDSRKYRRTRQNRLRYRKKRFNNRRGMISRDGFAPSIRNKRDVHIRLYEEYCKIFPIAKAIFKMGQFDTQVLKAIEAGLPVPKGADYQRGEQYGYATLREAVFARDNYKCICCGKSAIKDGVKLRIHHIGYLSGDRSNRMANLGSVCENCHTPKNHKQGGKLYNLKPKLKELKGATFMTTVRYSMVKNLKAATPNVDIKVTYGAATKLARKDLNVRKTHSNDAYCMGEFHPKHRSDFRHYKKCRRNNRVLSRFYDAKYRDLRDGSTKTGSQLSCGRTNRKISRHIKLDERIYRAHKISKGRVSTRRQHYSLRPGDKVLYDGKVYFVKGVQSNGTSIKLANGKVCPLKKVNILQHCNAWAFIC

SEQ ID NO: 18416 - protein, 512 aa, unidentified
MSTVYVLNKDGKPLMPTTRCGHVRRLLKEQKARVVTSKPFTIQLLYETDDVVQSLYLGIDPGRTNIGVAVVKTDGTAVFTAHLETRNKEIPKLMKKRKDSRRARRTNGRRCRRQRRAKANGTISKKCVKQTTAQNGSVSKRAKEIGVIKRHLPGCEKEVLCIGIKNKEAKFSNRTRPEGWLTPTANQLLQTHINLVKKIRKFLPISDVVLEINKFAFMRLDNPNIQKWQYQQGPLYQKASLEEAVSEMQECHCLFCKKPIDHYHHVVPQHKNGSNTIGNIVGLCAKHHDLVHKDTTWQKKLAKKKTGLNKKYGALSVLNQIIPTLTKELSSLFLKHFFVTNGKSTYDYRAAHGVSKDHWLDAYCIACSVLPNDTCDKTINSRVPYEFKQFRRHDRRALNNENMSRVYTFNGKMVATNRHKATEQTTDSLEEFRQRQPNDVCNLKVKEHHPTYRNMNRNYPGSVFLIGKQVHVMQGIAGSKDGEATTYKDTNANSIAAGKCKFVAKNSGILFV

SEQ ID NO: 18417 - protein, 414 aa, unidentified; identical to SEQ ID NO: 2588

SEQ ID NO: 18418 - protein, 431 aa, unidentified
MPNKVYIINKHGRPLMPCSPAKARHLLDEGKAKVKKRTPFTIQLIYGSSGYTQEVILGVDAGSKTIGMSVSTTKEELLSAEVKPRNDVVDLLSTRREFRRARRNRKTRYRKPRFDNRVRSKHKGWLAPSVEVKIQEHITSIKRVCRILPVSKVVIETAEFDLQLLKAIEEGKPVPQGEDYQQGEMYGHYNVRQYVLWRDNYTCQCCGTHPSKKKEVRLHVHHLESRKVGGDAPDNQVTLCESCHEKLHKGLIAEKDFKKRKRRSTRDATFMGIMRKTLMQRLCSELPIPVIETRGYITKATREKLLVLPKSHTNDALAIAQGKQGFNVGYLPGIVQINKIYTIRPVRHHNRQLHKATILKGGIRKSNQTEKYVFGYCLFDKVQFNGQDCFIWGRRTTGIFTIKTINGKMIKDGISFKKLKLVEKSTSYLIA

SEQ ID NO: 18419 - protein, 420 aa, unidentified
MQYVYVLNKHGEPLMPCSPCKARLLLKQKKACVVKRTPFTIKLLYGSTGYKQPITLGVDAGSKHIGISATTEKCELYRVEATPRNDAVDLLSARRAFRRNRRNRKIRYRAPRFNNRVHSKHKGWLAPSVEVKIQEHITLIKRVCRILPVTLVRVETAEFDTQRLKAMLEGKPLPVGTDYQHGEMYDEYNVRQYVLKRDNYTCQCCGAHPTKTKAVKLHVHHIETRRTGGNAPNNLITLCTACHKALHAGKATLNGKKRGKPLKDAAFMGIMRKTLMERLLKELKIPVQETYGYITKYLREKHSIPKSHTNDARCISKNPLAIPCDTCYYTKAIRHHNRQLHKATILKGGIRKANQAPYTVKGYRLWDKVFYHGSECFITGRRTSGYFALKKMDGTVVSNSASYKKLRLLELATNYIAERR

SEQ ID NO: 18420 - protein, 462 aa, unidentified; identical to SEQ ID NO: 2784
  REGION 1..462: note = IscB polypeptide

SEQ ID NO: 18421 - protein, 447 aa, unidentified; identical to SEQ ID NO: 8397

SEQ ID NO: 18422 - protein, 434 aa, unidentified; identical to SEQ ID NO: 7534

SEQ ID NO: 18423 - protein, 456 aa, unidentified
MAIFVLDKKKQPLMPCSEKRARLLLQRGRAVVHKRYPFTIRLKDRVGGSTQPLSLGIDPGSKTTGLALIREPDSQQRHVLCLFELIHRGYQIKKALQQRAAFRRRRRSANLRYRAPRFNNRTKPKGWLAPSLQHRVDTVMAWVNRLSRLAPVTAISQELVRFDTQKLDNPEISGVEYQQGTLLGYEVREYLLEKWGRECAYCGTADTPLEIEHVVPRSRGGSNRVSNLTLSCHPCNAEKDSQTLTDFFATNKGLKKRLKANGLSADAQLERVQRQLKQPMRDASAVNATRWALFSALKTTDLPVAVSSGGRTKYNRQRLNIPKTHALDAACVGAFGKLYDWTVPTLTIKAMGRGSYQRTRLTKHGFPRGYLMRQKQVHGFQTGDMVRAIVPTGKKAGTHTGRVAIRKTGSFNIQAEYGAVQGISHKYCTLIQRSDGYGYYVTLFSNLTGEAGRAVA

SEQ ID NO: 18424 - protein, 269 aa, unidentified
MVYVLDKNGQTLMPTDRHRKVRLMLQSGQAKVIKRCPFTIQLNYDSGHQTQEISLGIDAGSKHIGVSATTKIKVLYEADVELRNDIVDLLSSRRELRRGRRNRKTRYRQAKFNNRRLGNGWLPPSIRQKIGTHLTVVENICKILPISRIMVETASFDIQKIKNTDIQGAEYQQGDQLGFWNIREYVLFRDNHTCQCCKGKSKDKILNVHHIESRKTGGNAPNNLITLCEICHTVVIIKVPYSYRRPSNAVCDLRMLHLWELCDGLSTKH

SEQ ID NO: 18425 - protein, 431 aa, unidentified
MPNKVYVINKHGRPLMPCSPAKARHLLDAGKAKVKKRTPFTIQLVYGSSGYTQEVILGVDAGSKTIGVSALTKKEELFAANVIPRNDVVDLLSTRREFRRARRNRKTRYRKPRFDNRVRSKHKGWLAPSVEVKIQEHIIAIRRVCGILPVSKVVVETAEFDLQLLKAIADGKPVPQGEDYQKGEMYGHYNVRQYVLWRDDYTCQCCGAHATKKKEVRLHVHHLESRKVGGDAPDNQVTLCESCHEKLHKGLIAEKDFKKRKRRSTRDATFMGIMRKTLMQRLYSELPIPVIETRGYITKATREKLLVLPKSHTNDALAIAQGKRGFNVGYLPEIAQIDKIYTIRPVRHHNRQLHKATILKGGIRKSNQAEKYVFGYRLFDKVQFNGQDCFIWGRRPTGIFTIKTINGKMIKDGISFKKLKPVEKSTSYLIA

SEQ ID NO: 18426 - protein, 416 aa, unidentified
MEGVWIMVYVLNQEGKPLMPTSRHGKVKHLLRSGKAKVVKRTPFTIQLCYETPEYTQPITLGVDAGSKVVGLSATTEKEELYSSEVELRNDIVNLLSTRRQNRRTRRNRLRYREARFLNRTSSKKKGWLAPSIQHKVDSHLKAIANVSKILPISKIIIETASFDIQKIKNPEISDVEYQQGEQLGFWNVREYVLWRDGHKCQYCHGKSKDKVLNVHHKESRKTGGDSPGNLVTLCKTCHDLYHAGRINLKLTQSKSFRDATFMGIMRWSVYNRLKEIYHNVSMTYGYITKNTRIAHNIEKVHNADALCITGNLDATRSNVIYNQAFKRRHNRQIHKANFLKGGRKKLNQAPYEVKGFCLFDKVLFQGEECFIFGRRSSGYFDLRKLDGTVVHRSASYNKLKLLEKQSTLLVERKVA

SEQ ID NO: 18427 - protein, 415 aa, unidentified
MVYVLDKNGQPLMPTDRHRKVRLMLQSGQAKVIKRCPFTIQLNYDSGHQTQEISLGIDAGSKHIGVSTTTKIKVLYEADVELRNDIVDLLSSRRELRRGRRNRKTRYRQAKFNNRRRGNGWLAPSIRQKIGTHLTVVENICKILPISRIMVETASFDIQKIKNPDIQGAEYQQGDQLEFWNVREYVLFRDGHICQCCKGKSKDKILNVHHIESRKTGGNAPNNLITLCETCHTGYHKGTVQLPKAIKRGMRFKDAAFMGIMRWAFYEALKQQYEPVALVHNTYGYITKHTRIEHNLPKEHYVDARCISGNPEASSNGEYYYQKKVRCHNRQIHKLTVLKGGIRKQNQATYLVKGYRLFDKVSYQGKGYFVFGRRQSGFFDIRTLSGEKVNKGSLSCKKLKFIATRTYYLTERRAV

SEQ ID NO: 18428 - protein, 533 aa, unidentified
MSRGMTHPHFGVFPASNPADRCAKPRESNPPSGGVFIDRKEGIRVPVYVISSTGKPLMPSRRFVHVRLLLKEGKAKVVKTKPFTIQLLYESTEYTQPLYGGTDPGRTNIGEAVLDQCGTVQYAAHVESRNKDIPKLMENRAAHRSASRRGERKRRQRRAVANGTITFPLQKQRILPGCQKPITNKFIINSEAKFLNRKRPANWLTPTTNQLVQTHLNMVKKICSILPVTDWTLEINKFAFMLMEDGTIRGVDFQNGRMKGYPDVEAYIYAIQDGKCPFCGKTIEHYHHIKPRSEGGSNRPENLVGLCSDCHARIHKGDTEMAGLIDKLGEQKKYAALSVLNQAIPYIYQGLVEIFGEEHTHICYGWQTKEMYTKLKIPKTHSNDAICIAALGSGVVPPIQMTNPYEVKQCRRHNRAIVKAQRERTYKLFGETVAKNRHPRFKQEGPSLEDFVESIPAAYRQQVISVLKVTPSKRYYNTMDRDLPGTVFYYQGHRYVKSGQSSGGKDLRAYGMGSKNFPSAKVSIVPSGGVVYL

SEQ ID NO: 18429 - protein, 519 aa, Streptomyces sp.
MATFSAGQQIHRAVPPQRRALESAGADTPRIGHETARGRHVPPVAPSGEHVREETVGGSPAADGDTFRPAEAGETPRERHPSVFVLDRHGAPLQPCHPARARKLLGKGRAVVARHTPFVIRLKDRTIAESTVEGVELGIDPGSRHTGIAVFTATGGERRGRFAVRLDHRGAQIRRKLQQRSDFRRGRRTRNLRYRAPRHDNRARREGWLAPSLRHRVDTTVAWVDRLARWAPVTAVHVESVAFDTHAISSGGPLEGAEYQHGTLHGTEVREYLRTKWKRACGYCGATDVPLNVDHVRPTSRGGSDRVSNLVLACVPCNQEKTNRPVEEFARAKTRAARILAQAKVPLRDAAAVNATRWALRRALEARLPTHGASGGRTRWNRIRNHLPKTHTLDALAVGELGAVTETVNRVLIAGCTGRGTHARTRSDAYGFPRLRLPRRKRFFGFMTGDLVRACVPDGKNAGTHTGRVAVRASGSFAVRTQSGLFTARHTRFRLLQRADGYAYQATSEGRPGYLVPRP

SEQ ID NO: 18430 - protein, 425 aa, unidentified; identical to SEQ ID NO: 2429

SEQ ID NO: 18431 - protein, 457 aa, Scytonema sp.; identical to SEQ ID NO: 6260

SEQ ID NO: 18432 - protein, 431 aa, unidentified
MPNKVYVINKHGRPLMPCSPAKARHLLDAGKAKVKKRTPFTIQLVYGSSGYTQEVILGVDAGSKTIGMSASTTKEELLSAEVKPRNDVVDLLSTRREFRRARRNRKTRYRKPRIDNRVRSEHKGWLAPSVEVKIQEHITSIKRVCRILPVSKVVIKTAEFDLQLLKAIADGKPVPQGEDYQKGEMYGHYNVRQYVLWRDDYTCQCCGAHATKKKEVRLHVHHLESRKVGGDAPDNQVTLCESCHEKLHKGLIAEKDFKKRKRKSTRDATFMGIMRKTLMQRLCSELPIPVVETRGYITKATREKLLVLPKSHTNDALAIAQGKHGFNVGYLPGIEQIDKIYTIRPVRHHNRQLHKATILKGGIRKSNQTEKYVFGYRLFDKVQFNGQDCFIWGRRTTGIFTIKTINGKMIKDGISFKKLKPVEKSTSYLIA

SEQ ID NO: 18433 - protein, 457 aa, Anaerostipes sp.; identical to SEQ ID NO: 2712

SEQ ID NO: 18434 - protein, 406 aa, unidentified; identical to SEQ ID NO: 7406

SEQ ID NO: 18435 - protein, 427 aa, Eubacterium sp.; identical to SEQ ID NO: 3021

SEQ ID NO: 18436 - protein, 450 aa, unidentified; identical to SEQ ID NO: 2935

SEQ ID NO: 18437 - protein, 416 aa, unidentified
MVYVLDKNGQPLMPTDRHRKVRLMLQSGQAKVIKRCPFTIQLNYDSGHQTQEISLGIDAGSKHIGVSTTTKIKVLYEVDVELRNDIVNLLSSRRELRRGRRNRKTRYRQAKFNNRRRGNGWLAPSIRQKIGTHLTVVENICKMLPISRIMVETASFDIQKIKNPDIQGAEYQQGDQLGFWNIREYVLFRDNHTCQCCKGKSKDKILNVHHIESRKTGGNAPNNLITLCETCHTGYHKGTVQLPKAIKRGMRFKDAAFMGIMRWAFYEALKQQYEPVGTPVHDTYGYITKHTRIAYNLPKEHYVDARCISGNPEASSNGEYYYQKKVRCHNRQIHKLTVLKGGIRKQNQATYLVKGYRLFDKVSYQGKGYFVFGRRQSGFFDIRTLSGEKVNKGSLSCKKLKFIATRTYYLTERRAV

SEQ ID NO: 18438 - protein, 420 aa, unidentified
MQYVYVLNKHGEPLMPCSPRKARLLLKQKKACVVKRTPFTIKLLYGSTGYKQPITLGVDAGSKHIGISAATEKNELYCEEATPRNDVVDLLSARRAFRRSRRNRKTRYRAPRFNNRVHSKHKGWLAPSVEVKIQEHITLIKRVCRILPVTFVRVETAEFDTQRLKAMLEGKPLPVGTDYQLGEMYDEYNVRQYVLKRDNYTCQCCGAHPTKTKAVKLHVHHIETRRTGGNAPNNLITLCTACHKALHAGKVTLDGKKRGRSLKDAAFMGVMRKTLMERLLKELKIPVQGTYGYITKYLREKHSIPKSHTNDARCISKNPLAIPCDTCYYTKAIRHHNRQLHKATILKGGIRKANQAPYTVKGYRLWDKVSYNGSECLITGRRTSGYFALKKLDGTVVSNSASYKKMRLLEVATNYITERR

SEQ ID NO: 18439 - protein, 627 aa, unidentified; identical to SEQ ID NO: 7833

SEQ ID NO: 18440 - protein, 472 aa, unidentified; identical to SEQ ID NO: 4432

SEQ ID NO: 18441 - protein, 470 aa, unidentified; identical to SEQ ID NO: 2949

SEQ ID NO: 18442 - protein, 420 aa, unidentified; identical to SEQ ID NO: 8060

SEQ ID NO: 18443 - protein, 443 aa, Anoxybacillus sp.; identical to SEQ ID NO: 7148

SEQ ID NO: 18444 - protein, 427 aa, Oscillochloris sp.; identical to SEQ ID NO: 5291

SEQ ID NO: 18445 - protein, 536 aa, unidentified
VLRPRYQYPTRWYPSREQGSGNGCLSGEENTDLEQEVSGTLSKGDHSHPGEQDFCVPAITIQGGPAMSVFVVGLNGCRLMPTSERKARLLLKHGKASVYRKVPFTIKLNYKTGSTTQSGYLGIDTGSQHIGVSVVREDGAVLHKEEIGLRDSMSKRKLMQSRASSRRGRRHRKTRYRHPKWRPKAKRVYCKTPDRKGRHWKKRKITFASKRPKGWLPPSLQSKTDHHIRWIKKLQDLLPDRYRLSIELGRFDPARLKDPEIHGELYQKGPQYDYENVRAYVLDRDRYTCQVCGKKGGKLHVHHILYRSHGATDDPQYMTTVCSDCHNTENHQQGGILYQWMQKQKKFTRGLRDATFMNILRKRLIEAFPGATFTYGNITKADRERLILPKSHGNDATAIAIVKTGIMTVKDKEPVIYIQQVRRKKRSLHEETPRKGRKEPNRKASRYDKNTKAVTVTKRKNKKKISITGCLFDRVELNGKKGWISGFTDKSCYVKDENDQYIRTSPKYKQVSLSKLKILHHCGNWAIGARQSLGKG

SEQ ID NO: 18446 - protein, 537 aa, unidentified; identical to SEQ ID NO: 9239

SEQ ID NO: 18447 - protein, 472 aa, unidentified; identical to SEQ ID NO: 7861
  source 1..472: note = freshwater bacterium

SEQ ID NO: 18448 - protein, 462 aa, unidentified; identical to SEQ ID NO: 5636

SEQ ID NO: 18449 - protein, 439 aa, Ktedonobacter sp.
MSKVFVLDTNHQPLNPVHPGEARLVLKQGKAAIWRRFPFTVILKYAVPAPQVEPLRVKLDPGSKTTGIAVLHDASGEVIFAAELSHRGHKITEALATRRARRRGRRHRKTRYRKPRFDNRRKKGEGWLPPSQISRLSNVLTWVRRLSGLCPITACSMELVKFDMQQMETPEISGGQYQQGTLAGYEVREYLLEKWGRQCAYCGAKDVPLEIEHINPRSKSRDDRVCNLTLACHPCNEKKGTQDIRDFLKHQPDLVQKILAQAKAPLKDAAAVNVTRWALYRRLQALGLPVECGSGGLTKSNRTMRGLPKSHWMDAACVGKSTPKVLKTTGVMPLLIVAQGHGSRQVTNGDRYGFPKGKPKQGGRVKGFRTGDMVKAVVLTGTKKGAYTGRVLVRASGSFDIVTKTARVAGISFTSCRVVQRSEGYRYALGTPVPEPQIR

SEQ ID NO: 18450 - protein, 431 aa, unidentified
MPNKVYVLDKHGRPLMPCSPAKARHLLDEGKAKIKKRTPFTIQLVYGSSGYTQEVILGVDAGSKTIGMSASTTKEELLSAEVKPRNDVVDLLSTRREFRRVRRNRKTRYRKPRFDNRVRSKHKGWLAPSVEVKIQEHITSIKRACRILPVSKVVVETAEFDLQLLKAIADGKPVPQGEDYQKGEMYGHYNVRQYVLWRDDYTCQCCGAHATKKKEVRLHVHHLESRKTGGDASGNLVTLCESCHEKLHKGLITEKDLKKRKHRSTRDATFMGIMRKTLMQMLCSELPIPVVETRGYITKATREKLLVLPKSHTNDALAIAQGKQGFNVGYLPGILQIDKIYTIRPVRHHNRQLHKATILKGGIRKSNQAEKYVFGYRLFDKVQFNGQDCFIWGRRTTGIFTIKTINGKMIKDGISFKKLKPVEKSTSYLIA

SEQ ID NO: 18451 - protein, 290 aa, unidentified
RIKAVLRLLPVTKITVETASFDLQLLKNPDISGKEYQEGEQLGFWNIREYVLCRDGHVCQHCYGRSKDPVLNVHHLESRRTGGDSPGNLITLCETCHKALHRGEITLKAKRGQSFRAEAFVGIMRWEVHNRLRALHPGIEVSNTYGYRTKHARIANGIAKSHCADAFCIAGNLGAERLCEFFFQKQTRRNNRQIHKLSILKGGIRKRNQAPFEVKGFRLFDKVACQGEEGFIFGRRSSGFFDVRKLDGTRISAGISCKKLHLLEKRRTYLTEIRKEEALPPLPEGRGLRA

SEQ ID NO: 18452 - protein, 519 aa, Streptomyces sp.; identical to SEQ ID NO: 18429

SEQ ID NO: 18453 - protein, 413 aa, unidentified; identical to SEQ ID NO: 3290

SEQ ID NO: 18454 - protein, 423 aa, unidentified; identical to SEQ ID NO: 3576

SEQ ID NO: 18455 - protein, 416 aa, unidentified
VPEMTNYAFVLDADGKPLSPTKEQKAWFLIRKKRATLNSKYPMVIQLNRVIPEEDICKDEIRCGIDDGGLHVGVALVQKCRNKNKVLFKGTIEQRDDVKHLMEVRKGYRKYHRSHKRYRPARFNNRSSSKRTNRIAPSILQKRQATWRVVIRLSKWIPVTSYWLEDVSMDIRVLTDGFQSYGWQYQKSNRLDENIRKAVILRDGCKCMECGKSNCRLEVHHIRPRRLDGTNTMANLITLCDGCHQKTEGKEEQYMQHYFTMLNSSDMKGLNHVSHVMIGKTWLRKQLSQLGPLHLTTGGDTANKRIDWEIAKSHSNDAICITDLRPDTCEIKDWTIKPIRRQSKAKTDNVLGIQHRDLVSYTYKNGETHTGYVTALYPELYALNFQSPTKHCKKVNARQCRLLWKYNKIYWLDDVV

SEQ ID NO: 18456 - protein, 526 aa, unidentified
MLWKFYRLIGRTSVRPISLAYRKKELFMRPVYVLDMNGKPLMPTCRFGKVRRMLKSGEVKVVDTLPFTVQLDRPTKTHVVQSVTLGCDPGRTNIGLAAVRSDGTDLYRSHCETRNKEIVDLMDARRAARRASRRGERLARKRLAAKHETATTFPDGRKLPGYEKPIMLKDIINTEARFNNRVRPAGWLTPTATQLLRTHLNLIKRISRILPVSDIALEINKFAFMQLDEPDKNKWNIDFQHGPLYGTGGLKAAVRQLQNDTCLLCQENVIEHFHHLIPRSKRGDNTINNIAGLCQKCHEAVHKSADTAEKLSTLKKGQTKRYGGTAVLNQIIPKLVEELGKTYHEHLHLTYGWQTKEFRTKHKLEKTHDTDAYCIAAGTMQTVNPNIRTDVYEIKQFRRHNRANIHHQTERTYKLNGQTVAKNRRKRTDQKTDSLAEWFENTVKQYGQQKAEHLRAELKVRKSTRYYNSKDRMMPGAVFQYEGNRYVVTGQLSGGQYFRAYGKGNRNFPAKKIRIISLNRGLVYVA

SEQ ID NO: 18457 - protein, 398 aa, Parasutterella sp.; identical to SEQ ID NO: 5456
  VARIANT 124: note = X can be any naturally occurring amino acid
  VARIANT 398: note = X can be any naturally occurring amino acid

SEQ ID NO: 18458 - protein, 470 aa, unidentified; identical to SEQ ID NO: 2825

SEQ ID NO: 18459 - protein, 462 aa, unidentified
MSVLVIGRNGRALMPTNPRKARLLLKKKTASVVCRHPFTIQLLYKTGCATQEGCIGIDTGSQHIGVGITCGDRVILKDEHALRSSMEKRSLLATRAVMRRGRRYRKVRYRKPKWRHHTKRMYFEKANRRGQHWRKVKTTTQSPRLKGWLPPSLQSKCDHHFRIIDRYLKYLPDPITRNLVIEAGRFDMARMNDPTIHGEMYQRGPMYDAENLRAYIFARDNYQCACCKAKAGTTRKADGTTVKLVAHHILFRSRGATDNPKYIISVCDHCHTTKAHQPGGILYSWMENKKKVARGLRDATFMNILRKRLFARYPQAAFTYGNITAADRKQLRLPKSHANDAVAISLFGKEASTVKNICQTMHYKQIRKSKRSLHEAIPRKGRKNPNTKAVRNKKNTTQVNGFKLWDSVLADGKKLFICSFTGTSAYLIDKNGCYISQPGKTYKQWPLSKLKRLHPNGNWLMA

SEQ ID NO: 18460 - protein, 451 aa, unidentified
MSVAVISKTGERLMPTSEYRARKLLKSGKAIKYSYHPFTIQLTERKTGNIQPIELCMDTGYIHIGISVKSEKHEYLTEQIDTVTDERSRHNARRMYRSQRRNRKRYRQPRFNNRKKDKGWIAPSLEHKKNIHVQAISRINNVMPLTDITMEMGNFDTQVLKAKEEGRPLPQGVDYQHGERYSIATLREAVFARDGYKCQCCGRTIKDGAILHVHHIKYRSQGGTNSISNLATVCDKCHTPKNHKPGGKLYGWKPKLPSFKGATFMTTIRWQLYNEAKALFPDIDIHITYGAATKERRRELNIDKSHINDAFVMGQFHPRHRIKAVLYKKKRRNNRCLEKFYDAKYIDSRDGKKRSGQELFNGRINRNHKKDSENLHQYRLQKVTAGKRTVRKQHYSVQPHDIIIYESRKRETTGCHCNGARVMLLPDKKSVSIKKIKIYRYAGGYFKSTFN

SEQ ID NO: 18461 - protein, 413 aa, Roseburia sp.
MTSYSFVLDANGKQLAPTKEPKAWFLIRKKRAALVSKYPMVIQLMKEIPEKEICQDEIRCGIDDGGLHVGIALVQKCKTKNKVVFKGTMEQRNDVKHLMEVRRGYRRYHRYHKRYRQARFDNRKSSKREGRIAPSILQKRQATIRVIHWLNKWINITNYWLEDVSVDIRVLTDGYQSYRWQYQKSNRLDENIRKAAILRDGGKCMECGKSNCRLEVHHIKPRRRNGSNTLDNLITLCESCHQKTEGQEELYMDRYFSLLKSSDNKNLNYAQHVMIGKMWLRKQLSGLGVLYLTSGGDTANKRIDWNIEKSHTNDAVCITDLQPDTCDIKEWAIKPMRRQSKAKTDHVLGIHHRDLVEYTFKNGETHRGYVTALYPDQKAINFQSQTKHCKKVNARKCKLLWKYSKIYWFENAS

SEQ ID NO: 18462 - protein, 442 aa, Lactobacillus sp.; identical to SEQ ID NO: 12912

SEQ ID NO: 18463 - protein, 412 aa, unidentified
MENKIEYCFVIDKNNQPLAPTKMNKGWYLIRKGKAKLKSMYPMVIQLEREIKSNKNDKNYIVCGIDDGSVHVGLAIVQKCPTKNKVVFKGTVEQRQDVKHLMDTRRGYRRYHRYHKRYRPKRFNNRSSSKRVGRLAPSIKQKKDAILRVLYQLNKWTNIKEYYLEDVSIDIRAMTDNYKPYKWQYQKSNRLDENLRKAAIIRDNYKCQECGKSNCKLEVHHIRARKYHGADTIGNLITLCFKCHQKTEGKEKDFENKYFKIIDSKPKRFDYTMHVMQGKNYLRNKISELGLLHLTNGGKTANKRIDWNIKKSHSNDAICIADGIPDSCNIKEWIIKPMRRKSKAKTDNVLGIKHRDLVSYTYKNGKTYTGYVISLCPKRLALSFQSRNKRCDKVNAQKCKLLWKFNKIYWLE

SEQ ID NO: 18464 - protein, 406 aa, unidentified; identical to SEQ ID NO: 7406

SEQ ID NO: 18465 - protein, 348 aa, unidentified
MSEVIVRNDITDKMTQRVKYRRNRRNRKIRYRKARWLNRANSIKNDRFSPTMQSKLHSHVKEIEYIKSILPITEMVFETGQFDTHFMKNPSLANPKVKHWGYQKGTNYGFENTKAMVLNRDSYTCQCCKGKHKDSKLEVHHIVFRSQGGSDEESNLITLCHTCHKDLHSGKINPKLSGKVKGNLKYATQMNSIRKQLFRLYPNAIETFGYVTKANRLHLGVNKEHYYDACTIATQGNAFNVKSNLYKKKCVSDGDFQKTKGVCSEQPIVTDKICGFRKFDKVRYFGNDYFIKGRMSTGYAILMDIDGDKVDFSAMPKGYKTPKMVNLKRLEARSTWMITTVEVTPNIA

SEQ ID NO: 18466 - protein, 472 aa, unidentified
VVGNNLLSIKPLINIGEGVIYSSICTGLSLQTYQKRKEVPYMVYVLDIDGQPLMPTTRHGKVRRLLNSHLAKVVKRCPFTIQLLYQSTKETQPVSLGVDAGSKHIGMAATTEKKVVYQEELSPRNDVVKLLSARRTLRRTRRNRKTRYRKPRFNNRAHSKHKGWLAPSVEVKIQEHITAIKRICQILPISEIHVETAEFDLQRLKAMDEGSPLPVGIDYQLGEQYDFYNTRQYVLHRDGYTCQCCGTHDNNIKLHVHHIESRQTGGDAPNNLIILCEHCHKALHEGKLELPKGKKRGKSYRDATFMGVMRKTLLERLKKEIDVPVEGTYGYITKYWRERAGLEKSHIHDAVCISKYPYAKPLDIYYLTKTVRHHNRQIHKSNFSKGGIRKRNQAPYLVKGFRLFDKVLYQGKEYFIFGRRATGYFDIRTLDGTKVNKGSISYKKLRIQDTAKAYLKEARAIPHMNKFTCVLA

SEQ ID NO: 18467 - protein, 418 aa, unidentified; identical to SEQ ID NO: 13450

SEQ ID NO: 18468 - protein, 402 aa, Arthrospira sp.
MARSLLKAGKASVFRRYPFTIILNKEVDANPEPLELKLDPGSKVTGIALKQGNHIIFAAELQHRGQQIKEALLSRRQLRRSRRNRKTRYRPARFLNRTRPEGWLAPSWQHRVDTLMTWVHRFRRLAPVGRITQELVRFDLQLMENPEISGVEYQQGELQGYEIREYLLFKWGRTCAYCGAQNVPLEVEHIQPRSKGGSDRVSNLTMACHSCNQAKGNGDIRDFLSGQPDVLSRLLRQAKSPLKDAAAVNSTRWALFKALKATGLPVTTGTGGQTKFNRLRLNLPKAHWLDAACVGPVESLEVLTSKPLLILAKGHGTRQMCGTNKYGFPNRHRSRRQIHKGFQTGDMVTVLVTAGKKIGSYLGRVLCRASGSFDITTASVRVAGISHKYCQPIHRKDGYAYA

SEQ ID NO: 18469 - protein, 466 aa, unidentified; identical to SEQ ID NO: 4288
  source 1..466: note = Cyanobacteria bacterium UBA11371

SEQ ID NO: 18470 - protein, 348 aa, Enterococcus sp.; identical to SEQ ID NO: 9214

SEQ ID NO: 18471 - protein, 514 aa, unidentified; identical to SEQ ID NO: 7895

SEQ ID NO: 18472 - protein, 557 aa, unidentified; identical to SEQ ID NO: 5269

SEQ ID NO: 18473 - protein, 427 aa, unidentified; identical to SEQ ID NO: 2799

SEQ ID NO: 18474 - protein, 420 aa, unidentified
MQYVYVLNKHGEPLMPCSPGKARLLLKQQKAHVIKRTPFTIKLLYGSTGYKQPITLGVDAGSKHVGFSASTEKRELYREEFTPRNDVVDLLSTRKQNRRSRRNRKTRYRAPRFDNRVHSKHKGWLAPSVEVKIQEHITVIKRICRILPITLVRVETAEFDTQRLKAMLEGKPLPVGTDYQLGEMYDEYNVRQYVLKRDNYTCQCCGAHTTAKKAVKLHVHHLESRKMGGNAPGNLITLCITCHDALHKGKVSLDNKKRGKPMRDAAFMGIMRRTLMSRLREELPITVQGTYGYITKMQREQNDIKKSHVNDARCISKHPLAEPCSVCYRTKAIRHHNRQTHKANFSKGGIRKRSQMPYVVEGYRLWDKVLYKGQECFVSGRRTSGSFTLKKLDGTRISKGVTFKKLRLLEPATNCLIERM

SEQ ID NO: 18475 - protein, 414 aa, unidentified; identical to SEQ ID NO: 11675

SEQ ID NO: 18476 - protein, 434 aa, Lactobacillus sp.; identical to SEQ ID NO: 13643

SEQ ID NO: 18477 - protein, 442 aa, unidentified
MVYVLNKDGQPLMPTNRHGKVRRLLKTNKAKVVKRCPFTIQLLYDTANHTQNITLGVDAGSKHIGLSATTEDKVLFEADAELRNDISKLLEARHAFRRSRRNRKTRYRKKRFDNRVSSKHKGWLAPSIEHKIQSHFAMVEKVHRILPVTKIVVETASFDTRLLKAQLEGKPIPQGTDYQNGELAGWNIREYIFHRDNYTCQWCKGKSKDPVLVTHHHAYWKGDHTNKPSSLITLCNTCNDSKYHKKEANRLWGWEPKITNSYKHAVFMGVMRWTFYNRLKEIYPNVSMTYGYITKNTRIENNLPKTHYVDARCISGHPEAKSSGEYFYYKKVRRHNRQLYKANTLKGGVRKRSQAEYIVKGFRLFDRVEYQNNEYFVFGRRASGFFDIRTLDGQKVNKGSISFKKLKLKETNKTYLIERRMADTGVSLAPLTTEVVSFRQTG

SEQ ID NO: 18478 - protein, 476 aa, unidentified
LAASGTEGVSHPGLPGKYKHKGGQLMSVAVISKTGERLMPTSEYRARKLLKSGKAIKHSYHPFTIQLTERETGDIQPIELCMDTGYIHIGISVKSEKHEYLAEQIDTLTDERGRHDACRMYRRQRRSRKRYRQARFNNRKRDQGWIAPSLEHKKKIHIQAISRINNVMPITDITLEMGNFDTQVLKAKEEGKPLPHGADYQHGGRYGIATLREAVFSRDGYKCQCCGRTIKDGAILHIHHIKYRSQGGTNSMSNLATVCDKCHTPKNHKPGGKLYNWKPKLSSFKGATFMTAIRWQLYNEVKALFPDIDIHITYGAATKERRRELDIDKSHVNDAFVMGQFHPKHRIKTVLYKKKRRNNRCLEKFYDAKYIDSRDGKKRSGQELFNGRINRNHKKDSENLHQYRLQKVTAGKRTVRKQHYKIQPHDIVIYENRKRETAGCHCNGTRVMLLPDKKSASIKKVKIYRYAGGYFKSAFN

SEQ ID NO: 18479 - protein, 248 aa, unidentified
LPVGTDYQLGEMYDEYNVRQYVLKRDNYTCQCCGAHTTAKKAVKLHVHHLESRKVGGNAPSNLITLCTACHDNLHKGKVTLDGKKRGKALRDAAFMGIMRNTLLERLRNELHIPVQNTYGYITKLLREQNDIKKSHVNDARCISKHPLAEPCSVCYRTKAIRHHNRQIHKAKILKGGIRKANQAPYIVKGFRLWDKVLYNGQECFISGRRSSGYFALKKLDGTTITNSISFKKLRLLEPATNYLIERK

SEQ ID NO: 18480 - protein, 424 aa, unidentified
MVYVITQDGTPLMPCSNVIARLLLKQGKAKVKRREPFTIKLTYETTTYTQTLTLGVDTGSGTLGTAAAKDNGDIVYMSEVTVRNDITKKMSQRSKYRRNRRNRKTRYRKARFMNRRNSIKDGRFSPTMRSKLHGHVKEVEYIHSILPITTMVFETSQFDTHLMKNPALADPKIRPWGYQKGPNYGYENTKAMVLNRDDYTCQHCHGRRGNRRLEVHHIIYRSQGGSDESDNLITVCHSCHRDIHDGKIVLNLQGKSKGTLKFATQMNFIRKQLLTIYPGAVETFGYVTKANRQQLDMEKEHFIDACVIASRGTRFTVKSLLYKKRCIPVGDFQKTKGVRSEQPIVTEKIQGFCKFDKVRYMGEEYFIKGRMSSGYAVLMDLQGKKADFSDMPKGYKTPKLSNLKRLGARSSWMVTSEEVTQNTA

SEQ ID NO: 18481 - protein, 496 aa, Streptomyces sp.; identical to SEQ ID NO: 4777

SEQ ID NO: 18482 - protein, 443 aa, Anoxybacillus sp.; identical to SEQ ID NO: 3379

SEQ ID NO: 18483 - protein, 406 aa, unidentified; identical to SEQ ID NO: 6079

SEQ ID NO: 18484 - protein, 430 aa, unidentified
MLVYVLKQNGQPFMPTARFGKVRRLLKTKKAKVVRREPFTIKLLYEPKTDVVQECYCGVDTGSRHIGVAVVSNDKVLYQSQTELRNDIKQKMDARRACRRNRRSRKTRYRKPRFLNRGNSTKSDRLPPSVKHKVQAHIDEIEFCKKILPISDSNLIVEVSQFDTALMKDPSLISEKVKHWGYQQGFNYGYSSRREAILHRDNYTCQCCGKKNCRLEVHHVKFKSNGGTDDEENLLTLCEDCHKGVHDGTVVLSKKPKKSKNLKYATHMSIIRSRLLKKYPNAIETFGFVTAENRNHLNLKKDHYIDACVIASGGLEFKELEVIFYKNRVSKGDYQLTKGIRGEQKLPTGKICGFRKFDKVEYLGEKYFIKGRMNSGFAILMNIFSEKVDFSSMPKGLKTPKLSNCNRISARRSCLCISQIRKEKAIHTLS

SEQ ID NO: 18485 - protein, 286 aa, unidentified; identical to SEQ ID NO: 16765

SEQ ID NO: 18486 - protein, 472 aa, unidentified; identical to SEQ ID NO: 7536

SEQ ID NO: 18487 - protein, 406 aa, unidentified; identical to SEQ ID NO: 2874

SEQ ID NO: 18488 - protein, 408 aa, unidentified; identical to SEQ ID NO: 6729

SEQ ID NO: 18489 - protein, 450 aa, unidentified; identical to SEQ ID NO: 2437

SEQ ID NO: 18490 - protein, 428 aa, Moorena sp.; identical to SEQ ID NO: 8874

SEQ ID NO: 18491 - protein, 423 aa, unidentified; identical to SEQ ID NO: 6814

SEQ ID NO: 18492 - protein, 373 aa, Moorena sp.; identical to SEQ ID NO: 6300

SEQ ID NO: 18493 - protein, 512 aa, unidentified; identical to SEQ ID NO: 15119

SEQ ID NO: 18494 - protein, 384 aa, unidentified
MVKSGMVMRKLPMYAADKFVICKFIRNTQARFCNRKRCPDWITPTVQHLVQTHLNIIRKISRYLPVTDIAFEVNRFAFMHMENPEAMGVDFQNGPLKGYGDVKEAIRTQQHGKCLMCKKPIAHFHHIVPRSRGGSDTIQNLAGLCTECHTKVHTDTAFRKDFDEKKSGQLKKYGALSALNQAVPFICKKLLEEYGEEHVHFCRGLDTSLIRTAFGFEKTKKNQMHEVDAYCIGLAALEVNEVETPAFDHTFQIRQFRRQDRSIIHHQTGRSYYQGKEKVAQNRKPGFEQKTTALSQWYKEQIRIHGEKEAEKLRSQLRVEKSCRHYNDMDRFLPGAVFLYEGKRYVLSGRITNGKYLRACGQGMKNFPAAECTFIRHNAGLVFI

SEQ ID NO: 18495 - protein, 415 aa, unidentified; identical to SEQ ID NO: 7357

SEQ ID NO: 18496 - protein, 460 aa, unidentified; identical to SEQ ID NO: 8636

SEQ ID NO: 18497 - protein, 415 aa, unidentified; identical to SEQ ID NO: 11853

SEQ ID NO: 18498 - protein, 547 aa, unidentified
  source 1..547: note = Clostridia bacterium
VALSRTIPLTANTQPRETQPPVSAGETYSKRRVAYMPTVYVLNKDGKSLMPTTRCMHVRHLLKNGKARVVKSKPFTIQLLYETDDVVQPLYLGIDPGRTNIGVAVVKADGAAVFTAHLETRNKEVPKLMKKRKESRCARRTNGRRCRRQRRAKANGTLSKKCVKQTTAQNGSASKRAKEIGVIKRRLPGCEKDVLCIGIKNKEAKFTNRARPEGWLTPTANQLLQTHINLVKKIQKFLPISDVVLEVNKFAFMQLDNPNIQKWQYQQGPLYQKGSLENAVSEMQEHHCLFCEKPIEHYHHVVPKSENGSNTIANIVGLCTEHHNLVHKDATWQKKLAKEKVGLIKKYSALSVLNQIIPALTKEMNSLFPKHFFVTNGKSTYDYRTAHGVSKDHWLDAYCIACSVLPNDVCDSNINSHVPYELKQFRRHDRRVLHKANMSRVYTLNGKTVATNRHKAIKQTTDSLEEFRQSHPGDVCKLKVKEHHPAYRNLNRNYPGSVFLVDGQVHVMQGVSGSHNGKADGYYNTNGNAYPYYKCKFVVKNEGIVFA

SEQ ID NO: 18499 - protein, 413 aa, unidentified; identical to SEQ ID NO: 10655

SEQ ID NO: 18500 - protein, 427 aa, Nostoc sp.; identical to SEQ ID NO: 2670

SEQ ID NO: 18501 - protein, 428 aa, unidentified; identical to SEQ ID NO: 15592

SEQ ID NO: 18502 - protein, 408 aa, unidentified
ICEDVGYNYIGISVKSKSHEYVSAQYDTLQDEKEHHDDCRMHRRTRRNRLRYRKPRFDNRKRGEGWLAPSLIHKKELNVNVVKMYCAVMSITHATVEVGSFDTMLVKAIQEGKVIPEGADYQKGPRYNLATLREAVFYRDNYVCKICGRKATEGAILHMHHMFYWKGRHGNSLDELLTVCEKCHTPANHQKGGKLYGFGEDVKFADLSGAAFMNTVRWQIVNELYVAFGKPFVTITYGAMTKEKRIALQLEKSHNNDAYAMGEFHPNLRCMFEHYEKARRNNRILEKFYDSRYIDIRTGEIATGKELFNGRINRNHKKDSENLHKYRGKRTYAGHRALLRKKVNLNPGDLVSLNGENLIVHSTHTKKNGAVNVEFETPAKSGQKSASLKKLKIVKAANSIHPAWKKIS

SEQ ID NO: 18503 - protein, 465 aa, unidentified
MSTCVCVLSNSGERLMPTFRLGKVRRLLKDGKAKIVKHHPFTIQLLYDSKTNTQPIEICEDVGYNYIGISVKSESHEYVSAQYDTLQDEKEHHDDCRKYRRTRRNRLRYRKPRFDNRKRDDGWLAPSLEHKKELNVNVIKMYCEVMPITHAIVEVGSFDTMLVKAIEEGKATPESTDYQKGPRYKLATLREAVFYRDNYTCQVCGRKANEGAILHVHHMFYWKGRHGNSLSELITVCEKCHTPANHQKGGKLYGFGEDIKFANLSGAAFMNTVRWQIVNVLNAAFGKPFVTFTYGAMTKEKRIALHLEKSHNNDAYAMGSFHPVNRCAFEHYEKVKRNNRILEKFYDSQYIDTRTGELTNGKSLFNGRISRSHKKDSENLHKYRGKRICKGHRALRRKKLALNPGDLVSLNGEILVVHGTHTKKNGSVNVEFKTPSRGGKKSASLKKLKIVKTSNLMHSAWTKVA

SEQ ID NO: 18504 - protein, 430 aa, unidentified; identical to SEQ ID NO: 7477

SEQ ID NO: 18505 - protein, 465 aa, unidentified; identical to SEQ ID NO: 13070

SEQ ID NO: 18506 - protein, 424 aa, unidentified; identical to SEQ ID NO: 11329

SEQ ID NO: 18507 - protein, 419 aa, unidentified
MPTTRHGKVRRLLNSHLAKVVKRCPFTIQLLYQSTKEIQPVSLGVDAGSKHIGMAATTKKKVVYQEELSPRNDVVKLLSARRTLRRTRRNRKTRYRKPRFNNRAHSKHKGWLAPSVEVKIQEHITTIKRICQNLPISEIQVETAEFDLQRLKAMKEGKPLPVGTDYQLGEQYDFYNTRQYVLHRDGYTCQCCGTHDNNIKLHVHHIESRQTGGDAPNNLIILCEHCHKALHEGKLELPKGKKRGKSYRDATFMGVMRKTLLERLKKEIDVPVEGTYGYITKYWRERAGLEKSHIHNAVCISKYPYAKPLDIYYLTKTVRHHNRQIHKSNFSKGGIRKRNQAPYLVKGFRLFDKVLYQGKEYFIFGRRATGYFDIRTLDGTKVNKGSISYKKLRIQDTAKAYLKEARAIPHMNKFTCVLA

SEQ ID NO: 18508 - protein, 443 aa, Desulfofustis sp.
MQRVFVLDNEKQPLSPCAPARARHLLRDGKAAVYRRYPFTIIMKHRTGGEVQPLELKLDPGSKTTGIALVQKNKAGVRVVWAAELVHRGLQIKKALDARRAIRRSRRNRKTRYRQPRFLNRTKPQGWLPPSLLSRVGNVTTWGKRLQRFAPLCSVAVETVKFDLQKAENPMISGVEYQHGTLFGYEVREYLLEKWNRVCSYCGKKNVPLEIEHIVAKVNGGTNRVSNLTLSCLDCNQKKGSQPVEVFLKNKPHVLLKLLTQQKRPVKDTAAVNATRYAIGNALKALRLPVTFWSGGRTKFNRTQQNYPKKHWIDAACVGETGRNVCLIPQQRPFVITATGRGTRQMCRMDRFGFPRTGAKGAKTVQGFRTGDIVQASVPSGKKSGVHTGRVAVRTSGSFNITTVAGTVQGIPYRYCSLLYRADGYGYSSPTSAKRPIDVPAPV

SEQ ID NO: 18509 - protein, 442 aa, unidentified; identical to SEQ ID NO: 4113

SEQ ID NO: 18510 - protein, 423 aa, Moorena sp.
MRVFVLNSNRQPLDPCKPARARILLSTGKAKVYRRYPFTIILTEEIQEPITHGSQFKIDPGAKTSGLAIVQGNRIVWGGELTHRGFQIRDALTSRRQLRCARRNRKTRYRKPRFLNRSRPEGWLAPSLMSRVHNILTWVKKLTRLCPIAGISQELVRFDTQKLQNPEISGIEYQQGTLYGYELREYLLEKWNRKCAYCGTTGTQLEIEHIKPLSKGGSNRVSNLAIACHSCNQSKSAQEIEQFLSGKPDVLKRVLSQAKRPLTDAAAVNTTRWKLYHELKSIGLPVEVGSGGLTKFNRCRQNLPKTHWLDAANVGKVDTLIIEGYQPLLIAAKGHGTRKICRTNKYGFPIRYCSRTKIHKGFQTGDIVRAVVTKGKKIGTYVGRVATRKSGSFNISTKSGLVQGISHKYCQFIHRKDGYAYRH

SEQ ID NO: 18511 - protein, 489 aa, unidentified
VGAQCRVVTFSRRARAWPAVTGPRKGNYHRPPEGRKEPAMCVFVLDKRKNPLMPCSQRRARLLLERGRAVVHRHHPFTIRLKDRVGGKTQPVEIRVDPGSKGTGLAVVRIAEDTCPETGEVTTIVHVLERIELRHRGAAIRKALLQRSQRRRRRRSKNLRYRAPRFNNRRRPKGWLPPSLQHRVDTTASWVRRLSRMAPVLRARVETVRFDTQALETPEISGIEYQQGTLAGYEVREYLLEKWGRCCAYCDATGVPLQIDHIHPRARGGSNRVSNLTLACGPCNQTKGSTPVEAFLAHAPKRLARILAQARRPLQDAAAVNATRFAVCSAISDQTGLPITRFSGGQTKWNRTRAGLAKTHANDAVCVGPTDQVVGAAGPTLLVTCTGRGTRQRIMPNAHGFARGHRPRTKSVQGFRTGDLVRAEIPSGVNAGVWTGRIAVRSTGWFLLTATGQGADGERGHRKIGGVAARYCALVASGDGYGYAREVQP

SEQ ID NO: 18512 - protein, 487 aa, unidentified
MLNRNSVFVLDTNKKPCDPIHPGKARRLLSEGLAAVFRNYPFTIILKSESKPTKKYRIKIDPGARYTGLALLSDTDLVWCAELEHRGFEISEALRERRQVRRSRRNRKTRYRKARFLNRTRTKGWLPPSLISRVRNIKSWVDKLIKFAPISNISMELVKFDMQKIVNPEIQGTEYQMGELFSYEIRQYLLEKFNRTCVYCGTKEAVFNLDHFYPKSRGGSDRVSNLVLSCVDCNQAKSNSLPEDFLSDRPKILEIINKQRKQPLADAAAINATRWKLKEVLESTGLIVETGSGGLTKYNRKRNGISKSHWTDAACVGTSTPDSLNIRNYQPLIIKAMGRGNRQMVKPDKYGFPRTAPKLRQKSFYGFMTGDIVKAVVTKGKKIGVYTGRVAVRKTGSFNIKTKTETVQGISHKYCKNLHKSDGCTYSFGELVKQKTVNFVKKITETLDSPVQSHMFDTSGLTAEIEPKARRKKKKLKGTDGEQLSLF

SEQ ID NO: 18513 - protein, 409 aa, unidentified
EPLMPCSPRKARLLLKQKKACVIKRTPFTIKLLYGSTGYKQPVTLGVDAGSKHIGISATTEKHELYREEATPRNDVVDLLSARRAFRRSRRNRKTRYRAPRFDNRVHSKHKGWLAPSVEVKIQEHITLIEHVCRILPVTLVRVETAEFDTQRLKAMLEGKPLPVGTDYQLGEMYDEYNVRQYVLKRDNYTCQCCGAHSTKTKGVKLHVHHIETRRTGGNAPNNLITLCKACHKALHAEKVTLDGKKRGKPLKDAAFMGIMRKTLMERLRKELKIPVQGTYGYITKYLREKNGIPKSHTNDARCISKNPLAIPCDTCYYTKAVRHHNRQLHKATILKGGIRKANQAPYIVKGYRLWDKVAYNGTECFITGRRTSGYFALKKLDGTVVSNSISYKKMRLLEAATNYIIERK

SEQ ID NO: 18514 - protein, 425 aa, Nodularia sp.; identical to SEQ ID NO: 3165

SEQ ID NO: 18515 - protein, 416 aa, Chamaesiphon sp.
MSNYVFLIDANKQPMNPIHPAHARKLMELGKAAVFRMYPFTLIMNRIVDKIITYPLSLRIDPGSKLTGISIVNNRDEVIWAMELQHRGWVIKDALETRKAARRGRRNRHTRYRQARFLNRKRSKGWLAPSLMHRVLTIETWVKRLIKFSPVAEIRQELVRFDTQAIQNPEISGTEYQQGTLAGYEVREYLLEKWGRKCTYCSKECVPLQIEHIQARANGGTDRVSNLCLACEKCNQKKGTKDLKDFLKGKPDLVSRILKQAKAPLKDAAAVNSTRWKLFETLKVLGLPVTTGTGGQTKYNRTRLRLPKEHWLDAACVGVTESLKVLTSKILKVKATGYGTRRLCRMDKFGFPCSKPRQSYKTSWKTGDIARTIDRIIGRVVVQNEKRLEVRVNGKRHYCKPDEVKPIHRKDGYSYA

SEQ ID NO: 18516 - protein, 406 aa, unidentified; identical to SEQ ID NO: 3475

SEQ ID NO: 18517 - protein, 417 aa, unidentified; identical to SEQ ID NO: 13303

SEQ ID NO: 18518 - protein, 294 aa, Parasutterella sp.
AHLSRIKAVLRLLPVTKITVETASFDLQLLKNPDISGKEYQEGEQLGFWNIREYVLCRDGHVCQHCYGRSKDPVLNVHHLESRRTGGDSPGNLITLCETCHKALHRGEITLKAKRGQSFRAEAFVGIMRWEVHNRLRALHPGIEVSNTYGYRTKHARIANGIAKSHCADAFCIAGNLGAERLCEFFFQKQTRRNNRQIHKLSILKGGIRKRNQAPFEVKGFRLFDKVACQGEEGFIFGRRSSGFFDVRKLDGTRISAGISCKKLHLLEKRRTYLTEIRKEEALPPLPEGRGLRA

SEQ ID NO: 18519 - protein, 456 aa, Halomonas sp.; identical to SEQ ID NO: 12860

SEQ ID NO: 18520 - protein, 279 aa, unidentified; identical to SEQ ID NO: 5082

SEQ ID NO: 18521 - protein, 286 aa, unidentified; identical to SEQ ID NO: 16765

SEQ ID NO: 18522 - protein, 414 aa, unidentified
MPCSPAKARLLLKEKKAIVVRRTPFTIQLTIATGESKQPVSLGVDAGYKHVGLSASTEKAELYASEVELRPDVSDLLSARRTLRQSRRNRKTRYRAPRFDNRIRTKRKGWLAPSVENRINAHLSRIGAILRLLPVTKITVETASFDTQLLKNPDISGKEYQEGEQLGFWNVREYVLFRDGHACQHCHGRSKDPVLNVHHLESRRTGGDSPGNLLTLCETCHKALHRREIKLKTKRGQSFRAEAFMGIMRWEVLNRLKASHPELEVHNTYGYRTKHTRIVNGIDKSHCADAFCIAGNLGAKRLGEFFFQKQTRRNNRQIHKLSILKHGLRKRNQAPFEVKGFRLFDKVVCQGEEGFIFGRRSSGSFDVRKLDGTRISAGISCKKLRLLEKRRTYLTEIRKEEALPPLPEGRGLRA

SEQ ID NO: 18523 - protein, 258 aa, unidentified
MTAHKRRHTTQPFALCKLSYYVLWRDNYTCTCCGVKGTDKKPVKLHVHHFESRKHGGNAPDNYGTLCEDCHKKLHLGIITDISLKTRKRPSTRDAAFMGIMRKTLMQRLITGLSIPVAETKGYITKAAREEILKLPKTHTNDALAIAQGRHGFGIREPAYVKPTNRIYTVRPVRHHNRQLHKATILKGGIRKLNQASKYIFGFRLYDKVLYQGGECFVWGRRTSGSFLLRTIDGTKVKDGVGYRNLTLLERSTNYLIA

SEQ ID NO: 18524 - protein, 415 aa, Bacillus sp.; identical to SEQ ID NO: 16176

SEQ ID NO: 18525 - protein, 353 aa, Arthrospira sp.; identical to SEQ ID NO: 3451

SEQ ID NO: 18526 - protein, 421 aa, unidentified; identical to SEQ ID NO: 5657

SEQ ID NO: 18527 - protein, 323 aa, unidentified
MSVAVMSKTGMRLMPTSEYRARKLLKSKKATVYRYNPFTIQLTERETGDVQTVELCMDTGYLHIGTSVKSEKHEYLGVQIDTLTDEKQKHDACRMYRRQRRSRKRYRQSRFNNRKRSDGWIAPSLEHKKDIHIQTISRICNAMPITNITLEMGNFDTQVLKALEENRPLPQGTDYQHGERYGIATLREAVFARDKYTCQCCRKTIADGAILHVHHIIYRSRGGTNRMSNLATVCDRCHTPANHKPGGRLYNWKPKIASFKGATFMTAVRWKMYNEVKSKFSDINIHITYGAETKEQRRAFDITKSHVNDGTVSSEASFKTSML

SEQ ID NO: 18528 - protein, 415 aa, Bacillus sp.; identical to SEQ ID NO: 10988

SEQ ID NO: 18529 - protein, 252 aa, unidentified
MCCHDKVHKNEKEAQRLQKKKKGLNKKYGALSVLNQAIPFICKRLEEEFGAEHVFYCTGRETAAVRNSFGYQKTKDNQLHEVDAWCIGILALGKIPKTLPDFSYTCRIRQFRRQDRSRIKAQTERTYKLEGKIVAKNRKKRTEQKTDSLEDWYQKQTALYGQKEADRMRSRLTAAKSQRRYNAPSRILPGTVFLYDGKRHVLSGQLTGGKYFRAVGDAKTNYPASKCRIVRKNEGLVFISQVITERVAVSHG

SEQ ID NO: 18530 - protein, 406 aa, unidentified; identical to SEQ ID NO: 2874

SEQ ID NO: 18531 - protein, 438 aa, Petrotoga sp.; identical to SEQ ID NO: 10031

SEQ ID NO: 18532 - protein, 442 aa, unidentified; identical to SEQ ID NO: 4522

SEQ ID NO: 18533 - protein, 440 aa, Clostridium sp.; identical to SEQ ID NO: 8300

SEQ ID NO: 18534 - protein, 447 aa, unidentified
MYWLIASNISKKKVPCMVYVLDINGQPLMPTTRHGKVRRLLNSHLAKVVKRCPFTIQLLYQSTKEIQPVSLGVDAGSKHIGMAATTEKKVVYQEELSPRNDVVKLLSARRTLRRTRRNRKTRYRKPRFNNRVHSKHKGWLAPSVEVKIQEHITAIKRICQILPISEIHVEISEFDLQRLKAMEEGRTLPVGTDYQLGEQYDFYNTRQYVLHRDGYTCQCCGTHDNNIKLHVHHIESRQTGGNAPSNLITLCEHCHKALHKGKFELPKGKKRGKTYRDATFMGIMRKTLLERLKKEIDVPVAGTYGYITKYWRERAGLEKSHINDAICISKYPYAKPLDTYYLTKVVRNHNRQIHKSNFSKGGIRKRNQAPYLIKGFRLFDKVLYQGKEYFIFGRRATGYFDIRTLDGTKVNKDSISYKKLRIQDTAKAYLKEARAIPHMNKFTCVLA

SEQ ID NO: 18535 - protein, 431 aa, unidentified; identical to SEQ ID NO: 4463

SEQ ID NO: 18536 - protein, 447 aa, unidentified; identical to SEQ ID NO: 3626

SEQ ID NO: 18537 - protein, 390 aa, unidentified
LQFYRKEHSIMQYVYVLNKHGEPLMPCSPGKARLLLKQQKACVVKRTPFTIKLLHGSAGYKQPVTLGVDAGSKHVGLSASTETHELYCEEFTPRNDVVELLSTRRQNRRSRRNRKTRYRAPRFNNRVHSKHKGWLAPSVEVKIQEHITVIKRICRILPVTLVRVETAEFDTQRLKAMLAGKPLPVGTDYQLGEMYDEYNVRQYVLKRDNYTCQCCGAHTTAKKAVKLHVHHLESRKVGGNAPSNLITLCIACHNNLHKGKVTLDGKKRGKTLRDAAFMGIMRNTLLIRLRNELNIPVQNTYGYITKLLREQNDIKKSHINDARCISKHPLAVPCSVCYCTKAIRHHNRQIYKAKILKGGVRKANQATYIVKGFRLWDKVLYNGQECFISG

SEQ ID NO: 18538 - protein, 419 aa, unidentified; identical to SEQ ID NO: 4877

SEQ ID NO: 18539 - protein, 442 aa, unidentified; identical to SEQ ID NO: 6360

SEQ ID NO: 18540 - protein, 349 aa, unidentified
GAIRDALKARSAFRRRRRSQNLRCRSPRFLNRVKPKGWLPPSLRHRVETTLSFVRRMCRYLPVSGIAAELVKFDSQKLQTPEVSGIEYQQGTLFEYEVREYLLEKFGRKCVYCGAEGVPLNIDHVVPRAKGGSNRVSNLVLACVSCNQKKGARSLEDFLKGKPEVLARVRRELKTPLRDAAAVNATRWVLFNELKATGLPVETGSGALTKLNRHAFGVEKEHWLDALCVGRLNGVVTRKGLNALEIRCMGRGSRQRTRLTKYGFPRGYLMRQKCVHGFATGDMVEANVPKGKKAGLWRGRVAVRVSGSFNIQTPKGVIQGVGWKHCRLISHNDGYGYAWLGHAPHSSPA

SEQ ID NO: 18541 - protein, 427 aa, Nostoc sp.; identical to SEQ ID NO: 2670

SEQ ID NO: 18542 - protein, 457 aa, unidentified
VWLYQAVYNLGEGFLPSSEERTAFYWLLIYRKEHGIMQYVYVLNKHGEPLMPCSPGKARLLLKQQKACVVKRTPFTIKLLYGSAGYKQPITLGVDAGSKHVGLSASTEKRELYREEFTPRNDVVDLLSTRRQNRRSRRNRKTRYRAPRFDNRVHSKHKGWLAPSVEVKIQEHITVIKRICRILPITLVRVETAEFDTQRLKAMLKEKPLPVGTDYQLGEMYDEYNVRQYVLKRDNYTCQCCGAHPTEKKPVRLHVHHLESRHVGGNAPNNLITLCVACHKALHEGKITLDKGKKRGKPLRDAAFMGIMRNTLLARLKDELNIPVKQTYGYITKLLREKNKIPKSHVNDARCIAKAPNAKPCDTMLYTRALRHHNRQIHKAKILNGGIRKKNQAPYLVKGFRLWDKVRYNGEECFITGRRSSGYFALKKYDGTVISNSASYKKLMLLEAATNYITERS

SEQ ID NO: 18543 - protein, 420 aa, unidentified; identical to SEQ ID NO: 6212

SEQ ID NO: 18544 - protein, 498 aa, unidentified
MGCPLSPMHCGSSLSDGWRVTHVRRSSNHPRTLARGTLPPSGVTPPTRHLEFCMIFVLSSDGQPLDPCHPARARQVLRRGRARVVRRFPMTIQLLDRSAAQSTTHGLRLKIDPGSHTTGLALVSDATQTVVWAAELTHRSGTIREALQARSALRRNRRQRHTRYRPARFNNRRRQPGWLAPSLRSRVDHIMTWYQRLARRCPITAISVELVRFDTQALVHPEISGVAYQQGELLGYEVREYLLEKWQRTCAYCGATGLPLQVEHLVPRARGGTDRVSNLTLACGPCNQRKGPQTAAEYGFPQLQAQAQRPLRDATAVNSTRWALYQHLQATGLPVETGTGGRTKYNRTRLGWAKTHWRDAAAVGASTPERLRIITPMVLQITATGRGLHSRTKLDKYGFPRLRLPRQKRFFGFQTGDMVGAVVTTGGKQGRYVGRVAVRARGSFNVTTATGTVQGLHHRFFRLVQRADGYRYATQSSGRLLDPLTTAEANPQPHSSHR

SEQ ID NO: 18545 - protein, 512 aa, unidentified
MSTVYVLNKDGKPLMPTTRGGHVRHLLKEQKARVVRAKPFTIQLLYETNDVVQPLYLGIDPGRTNIGVAVVKANGTAVFTAHLETRNKEVPKLMQDRKKARRARRTNGRRCRRQRRAKANGTISKKCVKQDTAQSKNPSKRAKEIGIIKRRLPGYKKDVLCIGIKNKEAKYTNRTRPEGWLTPTANQLLQTHINLVRKMQKFLPISDVVLEVNKFAFMRLDNPDIQKWQYQQGPLYQKGSLENAVSEMQEHHCLFCDKPIDHYHHVVPQSENGSNTIANIVGLCAEHHNLVHKDAAWQKKLAEEKVGLNKKYGALSVLNQIIPALTNKLSVLFPKHFFVTAGKSTHDYRATHGVSKDHWLDAYCIACSVLPSDVCDSNINNHMPYELKQFRRHARRALNNENMNRVYTLNDKAVAINRHKATEQEAASLEEFRKEHPNDVCKLKVKEHHPTYRNMNRNYPGSIFLVGKHVHIMQGIAGSKDGKATTYKDSNANSITASKCKFVAKNSGILFV

SEQ ID NO: 18546 - protein, 414 aa, unidentified
MPCSPAKARLLLKEKKAIVVRRTPFTIQLTIATGETKQPVSLGVDAGYKHVGLSASTEKAELYASEVELRQDITDLLSARRALRQSRRNRKTRYRAPRFDNRIRTKRKGWLAPSVENRINAHLSRIEAVLRLLPVTKITVETASFDLQLLKNPDISGKEYQEGEQLGFWNIREYVLCRDGHVCQHCYGRSKDPVLNVHHLESRRTGGDSPGNLITLCETCHKALHRGEITLKAKRGQSFRAEAFMGIMRWEVLNRLKASHPELEVNNTYGYRTKHARIANDIAKSHCADAFCIAGNLGAERLGEFFFQKQTRRNNRQIHKLSILKGGIRKRNQAPFEVNGFRLFDKVACKGEEGFIFGRRSSGFFDVRKLDGTRISAGISYKKLHLLEKRRTYLTEIRKEEVLPPLPEGRGLRA

SEQ ID NO: 18547 - protein, 427 aa, unidentified
VPCMSTCACVFSKSGKRLMPTIRLGKVRHLLKDGKAKIIKHHPFTIQLLYDSETNIQPIEICEDVGYNYIGISVKSQSHEYVSVQYDTLQDEKDCHDSCRKMRRIRRNRLRYRKPRFDNRKRNKGWLAPSLEHKKELNVNVIKMYCKVVPITHVTVEVGSFDTMLVKAIQEGKAIPEGADYQKGPRYNLATLREAVFYRDNYTCQVCGREVQKDGAILHVHHMFYWKGRHGNSLSELLTVCEKCHTPANHQKGGKLYGFGEDIKFANLSGAAFMNTVRWQIVNELYAVFGKPFVTFTYGAMTKEKRIAFHLEKCHNNDAYAMGNFHPVDRCAFEHYKKVKRNNRILEKFHDSQYIDIRTGKVANGRSLFNGRINRSHKKNSENLHKYRGKRTRKGYRALRRKKVALNPGDLVSLNGEILVVHSTHAG

SEQ ID NO: 18548 - protein, 497 aa, unidentified
LVWNVQAPWDVYPSPTLCGLCLKVLRGRNGDADKKPIPTLTKDENRPSGRTTGLRAEQAEPAGIRKGDTLKVFVLNMRGKPLMPCSPAKARHMLKAGKAFVVRRTPFTIKLTIATGETKQDVTLGVDAGARHVGISATTEKEEVFASEVALRQDITGLLADRLAFRRARRNRKTRYRAPRFNNRVRSKHKGWLAPSVENRIQAHISRIEAVCRLLPVTKIVIETASFDIQKIRNPEVEGTGYQQGDQLGFWNVREYVLFRDGHICQHCRGRSKDPILNVHHLESRKTGGDAPNNLITLCETCHKAYHAGKIKLKVKRGQSFRAEAFMGIMRWTLLDRVRKAHPGLPVENTCGYLTKNTRITPGLPKTHCVDAYCIAGNLKAVRRGVCLHQRQVRKHNRQIHKCTVLSKTLKDGTKIGYRKLNQTPHLVKSFRLFDKVRCLGQTGFIFGRRSSGYFDVRRLDGVKLSSGISYRKLTLLEKRSTYLTELRKEDGASSPV

SEQ ID NO: 18549 - protein, 424 aa, unidentified
MRVFVLNMRGEPLMPCTQRKARLLLKKRKAVIYKYNPFTIQLTYATGETKQDCHIGIDTGSKYIGVAITSEDKVLFKGEIELRQDVKSNLDKRRMYRRDRRNRKTRHRQSRFLNRKRTDKWLPPSLQNRINHTFHWIDTFSRLVPSPKLHIEVGKFDAAKMINPEINGVDYQHGQTYGFFDERYFVFARDKYTCQCCGKSKDKILQTHHIIYRSNGGTNRVDNLITVCTDCHTSENHKKGGVFYKWQEQRKKVKQYKEPPFMNTLRKRIFAKYPNAVITYGSKTTPKRKEMGLDKTHYNDAIVISGVCKINENSEEWLLIKQFRKKKRSLHEATARKGRKIPNRNQVRNSKNTPCYQGFFLNDKVSVLGKSGYITGFTSNGAYIKDNANNYITLPNKTYKQVGISKLRLEHHNNNWQYMVKTAV

SEQ ID NO: 18550 - protein, 426 aa, Microcoleus sp.; identical to SEQ ID NO: 15321

SEQ ID NO: 18551 - protein, 419 aa, Eubacterium hallii
MVYVISQDSKPLMPCSNPVARLLLKQGKAKVKRREPFTIKLIYETTDYTQDLTLGVDTGSGTIGAAVSKDNGDIVYMSEVVVRNDITDKMTQRAKYRRNRRNRKTRYRKARWLNRSNSIKKDRFSPTMQSKLHSHVKEIEYIQSILPITEMVFETGQFDMHLMKNPSLANPKVRPWGYQKGANYGFENTKAMVLNRDNYTCQCCKGKHKDSKLEVHHIVFRSQGGSDEESNLITLCHTCHKDLHSGKINLKLSGKVKGNLKYATQMNSIRKQLFRLYPNAIETFGYVTKANRLHLGVDKEHYYDACTIATQGNAFNVKSNLYKKKCVSDGDFQKTKGIRSEQPIVTDKICGFRKFDKVRYFGNDYFIKGRMSTGYAILMDIDGNKIDFSTMPRGYKTPKLSNCKRITARSTVMMQVKVV

SEQ ID NO: 18552 - protein, 411 aa, unidentified
MPCSQRKARLLLKNKKAKIYSYHPFTIQLFYASGETIQMCHIGVDTGSRHIGLAITSENKVLLKGEIDLRQDVKSNLDTRRIYRRNRRNRKTRYRKARFFNRVKSKQKNWLPPSIESKIHHTFHWMNKLENLVDDSKLHIEVGKFDVAKMIHPDIQGEDYQQGQCYGYFDTRYFVFARDDYTCQCCKKKNKILRTHHIRYRSNGGTDRADNLITVCTDCHTSKNHKKGGILYEWQQRHKKGKPYKEPPFMNIIRKRIYQKYPDAVISYGSQTTPKRKERNLDKTHYNDAIIISGIEDIKENPKEWLRIKQFRKKKRSLHEAAARKGRKEHNRTQKRNRKNTSYDKGWYLNDYVEVFGKKGYISGFTNSGVYIKNTNDDYITMPDKKYKQVSHHNLVRICHNNNWQYEIQKI

SEQ ID NO: 18553 - protein, 435 aa, unidentified; identical to SEQ ID NO: 15399

SEQ ID NO: 18554 - protein, 447 aa, unidentified; identical to SEQ ID NO: 4640

SEQ ID NO: 18555 - protein, 490 aa, unidentified; identical to SEQ ID NO: 14918

SEQ ID NO: 18556 - protein, 470 aa, unidentified; identical to SEQ ID NO: 17213

SEQ ID NO: 18557 - protein, 544 aa, Streptomyces sp.; identical to SEQ ID NO: 5984

SEQ ID NO: 18558 - protein, 346 aa, Arthrospira sp.; identical to SEQ ID NO: 2872

SEQ ID NO: 18559 - protein, 442 aa, unidentified; identical to SEQ ID NO: 2903

SEQ ID NO: 18560 - protein, 451 aa, unidentified
VPAYRIKHITKKEVPYMVYVLDIDGQPLMPTSRHRKVRKLLNSHLAKVAKRCPFTIQLLYQSTKETQPVSLGVDAGSRHIGLAATTEQKVVYQEELVPRNDVVKLLSARRALRSSRRSRKTRYRKPRFNNRVHSKHKGWLAPSVEVKIQEHITAIKRICQILPISDIHVETAEFDLQRLKAMEEGRPLPVGTDYQLGEQYDFYNTRQYVLHRDEYTCQCCGTHDNNVKLHVHHIESRQTGGDAPNNLITLCEHCHKLLHAGKTILPKGKKRGKSYRDATFMGIMRKTLLERLRKEVDVPVSWTYGYITKYWRERAGLEKSHINDAICISKYPYAKPLDIYYLTKTVRHHNRQIHKSNFSKGGIRKRNQAPYLVKGFRLFDKVLYQGKSYFIFGRRATGYFDIRTLDGTKINKSSIGYRKLRIQDTAKAYLTETKKEARAIPHMNEFTCVLT

SEQ ID NO: 18561 - protein, 435 aa, unidentified
MTKTLTTQTTQACVLDQQGKPLMPTRRLGKVYRLLKTQKAHIVSYEPFTIQLDYEPDTQVIQPMTLGVDSGAIHSGYSVANEHREYYSAEVIARNDISNRLSDRRMYRQNRRARKTRYRKPRFNNRKNKKKGWLPPSLEQKVAVQVNEIDHLHRYFPIETIIVEVAEFDIQKIKNPDIAGIEYQQGTLQGYNIRNYLLEKHGRKCFYCGKAVSDFEVEHMLPKSKGGSNCIDNLTLSCHDCNAKKDTLTAEEFIRQTLPAKKAASKLKQLPNEKRLFKYMAYMNATRWALYDAIKERYPNVKMTYGYITKYNRIQAGLPKAHHIDAKCITGFPTVPSIDQTVVKVKMRRHNRQLHRATFSKGHVRKAASLPTMVFGFRLYDRVLFNNHRYYIKGRRSSGSFALVSVEGLKDEKRSYKKLKLLAHTNAYLTNRYVN

SEQ ID NO: 18562 - protein, 408 aa, unidentified; identical to SEQ ID NO: 4826

SEQ ID NO: 18563 - protein, 427 aa, Scytonema sp.
MCKVFVLDTDKRPLDPIHSAQARLLLRNKKAAVYRRFPFAIILKESRSDSPVSSIRLKIDPGAKITGIALVNDSTGEVVFAAELKHRGFAIRDALTSRRQLRRSRRNRKTRYRKPRFLNRTKPEGWLSPSLMSRVHNVESWVNRLRKFAPITAISVELVKFDMQLMRNPEIEGKEYQQGTLAGYETREYLLEKWNRQCAYCGVKDVPFQVEHIHPRSKGGSNSITNLTLSCEKCNVKKGTKDIKDFLKKDPTKLQKILAQAKKPASDAAAVNATRYKLLGVLKSTGLPVECGSGGLTKFNRTNQGLPKTHWIDAACVGQSTPTLNTKSIKALLITANGHGIREMCGTDKFGFPSRHRTNKQIHFGFQTGDIIKAVVTSGKKVGEYVGRVLCRATGSFDIATKTGRIAGISYKYCSAIHKKDGYSYGV

SEQ ID NO: 18564 - protein, 417 aa, unidentified
VYVLNKHGEPLMPCSPGKARLLLKQQKACVVKRTPFTIKLLYGGAGYKQPITLGVDAGSKHVGLSASTVKRELYREEFTPRNDVVDLLSTRKQNRRSRRNRKTRYRAPRFDNRVHSKRKGWLAPSVEVKIQEHITVIKRTCRILPVALVRVETAEFDTQRLKAMLEGKPLPVGTDYQLGEMYDEYNVRQYVLKRDHYTCQCCGAHTTTKKTVKLHVHHLESRKVGGNAPSNLITLCTTCHDALHKGKVSLDGKERGKPLRDAAFMGIMRKTLMARLRDELSIPVQGTYGYITKMRREQNDIKKSHVNDARCISKHPLAEPCSVCYRTKAIRHHNRQTHKANFSKGSIRKRSQMPYVVEGYRLWDKVLYKGQECFVSGRRASGSFTLKKLDGTRISKGVTFKKLRLLEPATNYLIERM

SEQ ID NO: 18565 - protein, 424 aa, unidentified; identical to SEQ ID NO: 11297

SEQ ID NO: 18566 - protein, 476 aa, unidentified
RARIFRQVPFTIQLTYENEPVLQPVTIAEDPGRSNIGMAVVSLSGELLSAAVVQTRNKEIAKLMEKRKQHRRASRNGERRARQRLAKKYHTMITAGFLMRKLPMYGKDKRVRCNVIKNTESRFCNRKRENGWLTPSAEHLVRTHINLIHKMQKFLPITDVAIEINRFAFLSLEDPSISGVDFQNGPLKGYDDLNAAVEDLQDGHCLMCNSPIEHRHHIVPRSMQGSNTIGNIAGLCCKCHERVHKDTRFEDRLKKKKAGLDKRYAAVSVLNQAIPFICKRLEQEFEKEHVHYCSGRDTGMVRRPFGYHKTKEEQLHEVDAWCIAVLALQHVPEKAPEFDHVHEILQFRRQDRSRIKAQTSRAYYHEGKKIAKNRKKAEGQRDDSLQEWRKRQVERYGKEQTRKMISQLEVKESIRRYNRLDRLMPGAVFYYQGVRYVMRGQHSNGQYLQAVGMGSKDFPAKKCKIVANNEGLVFVS

SEQ ID NO: 18567 - protein, 512 aa, unidentified; identical to SEQ ID NO: 2745

SEQ ID NO: 18568 - protein, 427 aa, unidentified; identical to SEQ ID NO: 3717

SEQ ID NO: 18569 - protein, 505 aa, unidentified
GQPILTRRRLAGAERIENLYGLLLNIFGCLAASGTEGVSHPGLPGKYKHKGGQLMSVAVISKTGERLMPTSEYRARKLLKSGKAIKHSYHPFTIQLTERETGDIQPIELCMDTGYIHIGISVKSEKHEYLAEQIDTLTDERGRHDACRMYRRQRRSRKRYRQARFNNRKRDQGWIAPSLEHKKKIHIQAISRINNVMPITDITLEMGNFDTQVLKAKEEGKPLPHGADYQHGGRYGIATLREAVFSRDGYKCQCCGRTIKDGVILHIHHIKYRSQGGTNSMSNLATVCDKCHTPKNHKPGGKLYNWKPKLSSFKGATFMTAIRWQLYNEVKALFPDIDIHITYGAATKERRRKLDIDKSHVNDAFVMGQFHPKHRIKAILCKKKRRNNRCLEKFYDAKYIDSRDGKKRSGQELFNGRINRNHKKNSENLHQYRLQKVTAGKRTVRKQHYKIQPHDIVIYENRKRETAGCHCNGTRMMLLPDKKSASIKKVKIYKYAGGYFKSAFN

SEQ ID NO: 18570 - protein, 401 aa, unidentified; identical to SEQ ID NO: 13584

SEQ ID NO: 18571 - protein, 557 aa, Ruminococcus sp.
MIYNLVSIRERSFMKQKKQKVMVYILNKKGKPLMPTTRCGHVRKLLDSKKAVVVSSNPFTIRLKYDTPNGVQDVFAGIDSGRENIGSGASNEDGDCLYLGELKTSNKSIKMKMTERAGFRKERRSHDRQNKQRKARKDHTEIQNGNADICRTTISCKSVQISYPAAEKSVTHKIIRGKEGKFANRHRDEGWITPSARQLVQMHMNDLKSMCRILPISHVTLERVAFDFQKLENENIKAWEYGKGKLYGYNSPEEYIHDVQGGKCLICGKPHIDYLHHIIPRSKGGSNKVSNLAGLCYDCHYGPMGVHNCQDTQDRLPELKNEANKQYKVSLLNSVMPVLIEEMDKFCKANSIIFSICGGHDTAKVRDMYDLQKDHCIDGFAISLAGRNVKSVDVMPDRIHQKQRYKKKSKNIIQKRNCREYYDGKKLAAVNRHKGTDQKADSLEEYMNTYAETHTADECKKHFESLTVKPARRTYTFHKEGRICPFHIGDKVRYEKKNKIKGNTKVETFICEGIRFPKDENKAKVEHNKTKSKKMKFCRVLEPGCTPYIDYRKLVLI

SEQ ID NO: 18572 - protein, 415 aa, Bacillus sp.; identical to SEQ ID NO: 2431

SEQ ID NO: 18573 - protein, 506 aa, unidentified
MVAVLSNVGKPMMPTTEYKARKLIEKGRAIPYQYKPMFTIMILDRSGGYTQPIELKEDTGYEHIGISVCSQKHEYERKEIITLLDEPEKHHDALMYRRTRRNRLGYRPPRFDNRKRENGWIPPSLQHKIDIHLYWFNQYAEVLPITDAVFEIGTFDTQRLNAIEKGEKLPYGEDYQKGEQADFYTLRDAVFARDDYTCVVCGKGIQDGAVLRTHHVGYRHGDRSNRMSNLVTVCDHCHTTKNHQEGGALYDLKAPTKKKANAAFMNVARQRIIDCAKKSHPEINISCAFGSETKMSRKNLQIEKSHTNDAYAMGEFHPKHRCKEKIFQKVRRNNRILSRFYDAKYIDRRDGLTKTGKQLSSGRTNRNHKLDSENFRVYRGKKIQKGRTATRQQVYEFKTKDIVLYQGKRYVVKGTNNKGQNVQLYLNMTADLKDLTIKTKNKRKTADPNRIEVGDKVFTEFHGKKKVFTVKNIDPTTNQVYLQADLSTKPSELKLVKYSNGYKQIK

SEQ ID NO: 18574 - protein, 379 aa, unidentified; identical to SEQ ID NO: 2727

SEQ ID NO: 18575 - protein, 465 aa, Calothrix sp.; identical to SEQ ID NO: 5126

SEQ ID NO: 18576 - protein, 413 aa, unidentified; identical to SEQ ID NO: 2858

SEQ ID NO: 18577 - protein, 477 aa, Caldanaerobius sp.; identical to SEQ ID NO: 12228

SEQ ID NO: 18578 - protein, 458 aa, Lactobacillus sp.; identical to SEQ ID NO: 4474

SEQ ID NO: 18579 - protein, 442 aa, unidentified
MVTVQQSTHHLPFGRVFIRRNLFMVYVISQDGKPLMPCSDPIARLLLKQGKAKVKKREPFTIKLTYETTNHTQGLTLGVDTGSGTIGTAVSKDNGDIVYMSEVVVRNDITDKMTQRAKYRRNRRNRKTRYRKARWLNRASSIKKDRFSPTMQSKLHSHVKEIEYIQSILPITEMVFETGQFDMQLMKNPSLANPKVRPWGYQKGANYGFENTKAMVLNRDNYTCQCCKGKHKDSKLEVHHIVFRSQGGSDEESNLLTLCHTCHKDLHSGKINPKLSGKVKGNLKYATQMNSIRKQLFRFYPNAIETFGYVTKANRLHLGVDKEHYYDACTIATQGNAFNVKSDLYKKKCVSDGDFQKTKGIRSEQPIVTDKICGFRKFDKVRYFGNDYFIKGRMSTGYAILMDIDGNKIDFSTMPRGYKTPKLSNCKRITARSTVMTQVKVV

SEQ ID NO: 18580 - protein, 442 aa, unidentified; identical to SEQ ID NO: 4522

SEQ ID NO: 18581 - protein, 512 aa, unidentified
MSTVYVLNKDGKPLMPTTRCGHVRYLLKEKKARVVASKPFTIQLLYETDDVVQPLYLGIDPGRTNIGVAVVKADSTAVFTAHLETRNEEIPKLMQGRKKARRARRTNGRRCRRQRRAKANGTISKKCVKQTTAQNGSASKRAKEIGVIKRHLPGCEKDVLCIGIKNKEAKFSNRTRPEGWLTPTANQLLKTHINLVKKIRKFLPISDVVLEINKFAFMRLDNPNIQKWQYQQGPLYQKASLEEAASEMQEHHCLFCKKSIAHYHHVVPQSENGSNTIGNIVGLCTKHHDFVHKDTAWQKKLAKKKTGLNKKYGALSVLNQIIPALTKELSSLFPKHFFATNGKSTHDYRIAHGVSKDHWLDAYCIACSVLPNDTCDRTINSRVPYELKQFRRHDRRALHKENMSRVYTLNGKSVATNRHKATEQTTDSLEEFRQRQPNDVCKLKVKEHHPTYRNMNRNYPGSVFLIGKQVHVMQGIAGSKDGEATTYKDTNANSIAAGKCKFVAKNSGILFV

SEQ ID NO: 18582 - protein, 431 aa, Escherichia sp.; identical to SEQ ID NO: 3801

SEQ ID NO: 18583 - protein, 475 aa, Blautia sp.; identical to SEQ ID NO: 4128

SEQ ID NO: 18584 - protein, 425 aa, Nodularia sp.; identical to SEQ ID NO: 3165

SEQ ID NO: 18585 - protein, 476 aa, unidentified; identical to SEQ ID NO: 13038

SEQ ID NO: 18586 - protein, 404 aa, unidentified
QASRRGERKARQRLAKRYGSMVKSGMVMRKLPMYAADRFVICKFIRNTQAWFCNRKRCPDWITPTVHHLVQTHLNIIRKISRYLPVTDIAFEVNRFAFMHMENPKAMGVDFQNGPLKGYDDVKEAICTQQHGKCLMCKKPIAHFHHIVPRSRGGSDTIQNLAGLCPECHTKVHTDTAFRKDFDEKKSGQLKKYGALSALNQAVPFICKKLLEEYGEEHVHFCGGLDTSLIRTALGFEKTKKNQMHEVDAYCIGLAALEVNEVETPAFDHTFQIRQFRRQDRSIIHHQTGRSYYQGKEKVAQNRKPGFEQKTTALSQWYEEQVRIHGEKEAEKLRSQLRVEKSCRHYNDVDRFLPGAVFLYEGKRYVLSGRITNGKYLRACGQGMKNFPAAECTFIRHNAGLVFI

SEQ ID NO: 18587 - protein, 406 aa, unidentified
MVYVQDIYGRPLMPTTRHGKVRRLLKSKKATVVNLCPFTIRLLYDTTGYKQEITLGVDTGTKHVGLSATTKSKELYASEVILRSDVVDLLSTRRELRKIRMYRLRYRKPRFMNRIKSKKRGWIAPSIRQKIDSHIRIIGFVYSILPVSKLIIEVAQFDTQKIKNPEISGKEYQEGEQLGFWNVREYVLARDEHKCQHCKGKSKDPVLNVHHIESRKTGGDSPSNLITLCKTCHKEFHKGNIKLKVNRGESLRDAAVMSIMKWELYDELKSLYPNVKMTFGYITKYNRINHGIEKSHVSDAFVISRNFDSERLGYYYKRKLVRRHNRQIHKMKAPKGGNKRMNQSPFKVFGFRLFDKVMFQGKERFIYARRLRGIFNIRDINGENKKDISYKKLEYVSHGLISIVAG

SEQ ID NO: 18588 - protein, 434 aa, Anoxybacillus sp.; identical to SEQ ID NO: 5674

SEQ ID NO: 18589 - protein, 431 aa, unidentified; identical to SEQ ID NO: 11325

SEQ ID NO: 18590 - protein, 357 aa, unidentified
LMPCSPAKARHMLKAGKAVVVRRTPFTIKLTIATGETKQDVTLGVDAGARHVGISATTEKEEVFASEVALRQDITGLLADRLAFRRARRNRKTRYRAPRFNNRVRSKHKGWLAPSVENRIQAHISRIEAVCRLLPVTKIVIETASFDIQKIRNPEVEGTGYQQGDQLGFWNVREYVLFRDGHICQHCRGRSKDPILNVHHLESRKTGGDAPNNLITLCETCHKAYHAGKIKLKVKRGQSFRAEAFMGIMRWTLLNRMRKAHPSLPVENTYGYLTKHKRIALGLPKTHCADAFCIAGNLKALRRGDFLFQQQTRKHNRQIHKCSILKGGVRKLNQAPFLVKGSSSKPPSLNDGGSRFV

SEQ ID NO: 18591 - protein, 483 aa, unidentified
LYIKMTSCTCTVFPACNHAKASSSQGKHNLLLRQERFIVKEVANMSTVYVLNKDGKPLMPTTRGGHVRHLLKEQKARVVRAKPFTIQLLYETNDVVQPLYLGIDPGRTNIGVAVVKANGTAVFTAHLETRNKEVPKLMQDRKKARRARRTNGRRCRRQRRAKANGTISKKCVKQDTAQSKNPSKRAKEIGIIKRRLPGYKKDVLCIGIKNKEAKYTNRTRPEGWLTPTANQLLQTHINLVRKIQKFLPISDVVLEVNKFAFMRLDNPDIQKWQYQQGPLYQKGSLENAVSEMQEHHCLFCDKPIDHYHHVVPQSENGSNTIANIVGLCAEHHNLVHKDAAWQKKLAEEKVGLNKKYGALSVLNQIIPALTNKLSVLFPKHFFVTAGKSTHDYRATHGVSKDHWLDAYCIACSVLPSDVCDSNINNHMPYELKQFRRHARRALNNENMNRVYTLNDKAVAINRHKATEQEAASLEEFRKEHPND

SEQ ID NO: 18592 - protein, 447 aa, unidentified; identical to SEQ ID NO: 8397

SEQ ID NO: 18593 - protein, 415 aa, Bacillus sp.; identical to SEQ ID NO: 7196

SEQ ID NO: 18594 - protein, 442 aa, Lactobacillus sp.; identical to SEQ ID NO: 9501

SEQ ID NO: 18595 - protein, 536 aa, unidentified
VLRPRYQYPTRWYPSREQGSGNGCLSGEENTDLEQEVSGTLSKGDHSHPGEQDFCVPAITIQGGPAMSVFVVGLNGCRLMPTSERKARLLLKHGKASVYRKVPFTIKLNYKTGSTTQSGYLGIDTGSQHIGVSVVREDGTVLHKEEIGLRDSMSKRKLMQSRASSRRGRRHRKTRYRHPKWRPKAKRVYCEIPDRKGRHWKKKEITFASKRAKGWLPPSLQSKTDHHIWWIKKLQDLLPEGYRLSIELGRFDPARLKDPEIHGELYQKGPQYDYENVRAYVLNRDRYTCQVCGKKGGKLHVHHILYRSHGATDDPQYMATVCSDCHNTENHQQGGILYQWMQKQKKFTRGLRDATFMNILRKRLIEAFPGATFTYGNITKADRERLRLPKSHGNDATAIAIVKTGIMTVKDKEPVIYIQQVRRKKRSLHEETPRKGRKEANRKASRYDKNTKAVTVTKRKNKKKITITGCLFDRVELNGKKGWISGFTDKSCYVKDENDQYIRTSPKYKQVSLSKLKILHHCGNWAIGARQSLGKG

SEQ ID NO: 18596 - protein, 512 aa, unidentified
MSTVYVLNKDGKPLMPTTRGGHVRHLLKEQKARVVRAKPFTIQLLYETNDVVQPLYLGIDPGRTNIGVAVVKANGTAVFTAHLETRNKEIPKLMQDRKKARRARRTNGRRWRRQRRAKANGTISKKCVKQTTAQNGSVSKRAKDIGVIKRRLPGCEKDVLCIGIKNKETKFTNRTRPEGWLTPTANQLLQTHINLVKKIQKFLPISDVVLEVNKFAFMRLDNPNIQKWQYQQGPLYKKESLESAVSEIQEHHCLFCKKPIDHYHHVVPQHKNGSNTIGNIVGLCAKHHDLVHKDSAWEKKLAQKSTGLNKKYGALGVLNQIIPTLTNELSSLFPKHSFVTNGKSTYDYRAAHGVSKDHWLDAYCIACSVLPSNVCDSNINNHMPYELKQFRRHDRRVLNNENMNRVYTLNNKAVAINRHKAKDQKTVSLEKFRKEHPDDVCKLKVKEHHPTYRNMNRNFPGSVFLVGKQIHVMQGIASSKDGKATKYNDTSATAIATGKCKFVAKNTGILFV

SEQ ID NO: 18597 - protein, 462 aa, unidentified
MSVLVIGRNGRALMPTTSRKARILLKKETASVVCRHPFTIQLLYKTGCATQEGCIGIDTGSQHIGVGVTCGDRVILKEEHELRSSMEKRSLLVTRAAMRHGRRYRKVRYRKPKWRQHTKRMYFEKPNRRGQHWRKVKTTTQSPRPKGWLPPSLQSKCDHHFRIIDRYLKYLPDSITRNLVIEAGRFDMARMNDPMIHGEMYQRGPMYDAENRRAYIFARDNYQCACCKAKAGTTRKTDGTTVKLVAHHILFRSRGATDNPKYMVSVCDHCHTTKAHQPGGILYSWMENNKKVTRGLRDATFMNILRQRLFARYPQAAFTYGNITAADRKQLRLPKSHANDAVAISLFGKEVSAVRDTCQTVHYKQVRKSKRSLHEAIPRKGRKHPNTKAVRNKKNTTQVNGFKLWDSVLADGKKLFICSFTGTSAYLIDKNGCYVSQPGKTYKQWPLSKLKRLHPNGNWLRA

SEQ ID NO: 18598 - protein, 512 aa, unidentified
MPTVYVLNKDGKPLMPTTRCMHVRHLLKNGKARVVKSKPFTIQLLYETDDVVQPLYLGIDPGRTNIGVAVVKADGAAVFTAHLETRNKEVPKLMKKRKESRCARRTNGRRYRRQRRAKTNGTISKKCVKQTTAQNGSVSKRAKEIGVIKRHLPGCEKDVLCIGIKNKEAKFTNRARPEGWLTPTANQLLQTHINLVKKIQKFLPISDVVLEVNKFAFMQLDNPNIQKWQYQQGPLYQKGSLENAVSEMQEHHCLFCEKPIEHYHHVVPKSENGSNTIANIVGLCTEHHNLVHKDATWQKKLAKEKVGLVKKYSALSVLNQIIPALTKEMNSLFPKHFFVTNGKSTYDYRTAHGVSKDHWLDAYCIACSVLPNDVCDSNINSHVPYELKQFRRHDRRVLHKANMSRVYTLNGKTVATNRHKAIKQTTDSLEEFRQSHPGDVCKLKVKEHHPAYRNLNRNYPGSVFLVDGQVHVMQGVSGSHNGKADGYYNTNGNAYPYYKCKFVVKNEGIVFA

SEQ ID NO: 18599 - protein, 451 aa, unidentified; identical to SEQ ID NO: 10609

SEQ ID NO: 18600 - protein, 420 aa, unidentified; identical to SEQ ID NO: 3004

SEQ ID NO: 18601 - protein, 414 aa, unidentified; identical to SEQ ID NO: 10183

SEQ ID NO: 18602 - protein, 389 aa, unidentified; identical to SEQ ID NO: 11535

SEQ ID NO: 18603 - protein, 398 aa, unidentified
GISVKSQSHEYVSAQYDTLQDEKACHDSCRKLRRTRRNRLRYRKPRFDNRKRGEGWLAPSLKHKKELNVNVVKMYCTVMPITHATVEVGSFDTMLVKAIQEGKAIPEGADYQKGPRYNLATLREAVFYRDNYVCKICGRKATEGAILHMHHMFYWKGRHGNSLNELLTVCEKCHTPANHQKSGKLYGFGEKIKFADLSGAAFMNTVRWQIVNELYVAFGKPFVTITYGAMTKEKRIALQLEKSHNNDAYAMGEFHPNLRCMFEHYEKARRNNRILEKFYDSRYIDIRTGEIATGKELFNGRINRNHKKDSENLHKYRGKRTYAGHRALLRKKVNLNPGDLVSLNGENLIVHSTHTKKNGAVNVEFETPAKSGQKSASLKKLKIVKAANSIHPAWKKIS

SEQ ID NO: 18604 - protein, 512 aa, unidentified; identical to SEQ ID NO: 5811

SEQ ID NO: 18605 - protein, 467 aa, unidentified; identical to SEQ ID NO: 14958

SEQ ID NO: 18606 - protein, 554 aa, Actinomadura sp.; identical to SEQ ID NO: 16529

SEQ ID NO: 18607 - protein, 426 aa, unidentified
MVYVQDIDGKPMMPTTRYGKVRRLLKNKKAVVVNLCPFTIRLTYVTSDYKQEIVLGVDAGTKHVGLSATTKSKELYSSEVILRNDIVDLLSTRRELRRARRNRLRYRKPRFDNRIKSKRPGWIAPSVKYKIDAHIRVVENVCSILPISRIVIEVAQFDTQKIKNPNISGKEYQEGDQLGFWNTREYVLARDGHKCQYCKGKSKDKILNVHHIESRKTGGDSPSNLITLCETCHKEYHKGNIDLKIKRGKSLRDAAVMGIMKWRLYEEIKSKYDRVSMTFGYVTKYNRINHGFEKSHVSDAFVISKNFNAIRLGYYYKVRLVRRHNRQIHKQKIQKGGIKRLNQSPFEVFGFRLFDRVMFENSYYFIFGRRKTGSFDIRYIDGKNQKNVTYKKLKLSRCKRFMIQMELNKKTRTCFENERNSDRDAA

SEQ ID NO: 18608 - protein, 442 aa, unidentified
MVTVQQSTHYLPFGRVFIRRNLFMVYVISQDGKPLMPCSDPIARLLLKQGKAKVKKREPFTIKLTYETTNYTQGLTLGVDTGSGTIGTAVSKDNGDIVYMSEVVVRNDITDKMTQRAKYRRNRRNRKTRYRKARWLNRASSIKKDRFSPTMQSKLHSHVREIEYIQSILPVTEMVFETGQFDMHLMKNPSLANPKVRPWGYQKGANYGFENTKAMVLNRDNYTCQCCKGKHKDSKLEVHHIVFRSQGGSDEESNLLTLCHTCHKDLHSGKINPKLSGKVKGNLKYATQMNSIRKQLFRFYPNAIETFGYVTKVNRLHLGVAKEHYYDACTIATQGNAFNVKSNLYKKKCVSDGDFQKTKGIRSEQPIVTDKICGFRKFDKVRYFGNDYFIKGRMSTGYAILMDIDGNKIDFSTMPRGYKTPKLSNCKRITARSTVMTQVKVV

SEQ ID NO: 18609 - protein, 413 aa, unidentified; identical to SEQ ID NO: 3220

SEQ ID NO: 18610 - protein, 427 aa, Moorena sp.; identical to SEQ ID NO: 7715

SEQ ID NO: 18611 - protein, 426 aa, unidentified; identical to SEQ ID NO: 3553

SEQ ID NO: 18612 - protein, 431 aa, Petrotoga sp.; identical to SEQ ID NO: 5928

SEQ ID NO: 18613 - protein, 425 aa, Nostoc sp.; identical to SEQ ID NO: 3714

SEQ ID NO: 18614 - protein, 427 aa, Parasutterella sp.; identical to SEQ ID NO: 4435

SEQ ID NO: 18615 - protein, 512 aa, unidentified; identical to SEQ ID NO: 12069

SEQ ID NO: 18616 - protein, 456 aa, unidentified
MSTCVCVLSNSGERLMPTFRFGKVRRLLKDGKAKIIKHHPFTIQLLYDSKANTQPIEICEDVGYNYIGISVKSQSHEYVSAQYDTLQDEKACHDSCRKLRRSRRNRLRYRKPRFDNRKRSEGWLAPSLEHKKQLNIRLIERYVSVIPITRATVEVGSFDTMLLQAIQKGESKPEGVDYQKGPRYNLATLREAVFYRDNYTCQVCGRKIADGAILHMHHMFYWKGRHGYQLDELVTACEKCHTPANHQKGGKLYGFGKDKKFANLSGAAFMNAVRWQIVDALHATYGKEFVTITYGAMTKEKRIALQLEKTHNNDAYAMGDYHPACRCKFRHYQKRRRNNRVLEKFYDATYIDARTGNKAKGKELFNGRISRNHKKDSENLHKYRSKKVSKGRRSIRRQRYAIQPYDTVRLENKTYITSGCHNKGTRLLIPANGKSKSVAISKVQVVCHAGAWIQII

SEQ ID NO: 18617 - protein, 423 aa, unidentified; identical to SEQ ID NO: 4062

SEQ ID NO: 18618 - protein, 475 aa, Blautia sp.; identical to SEQ ID NO: 4128

SEQ ID NO: 18619 - protein, 423 aa, unidentified
MVFVLDRHKKPLMPCSPKRARLLLARKRAVVHRLSPFVIRLRDRRVEESTLQPVAIKIDPGSKTTGMAMVRQEATEEGPHHHALHLSEVRHRGAAVHQAMLERAGHRRRRRSANLRYRPPRFDHRRRPQGWLPPSLTSRVGNVLNWTRRYGRWAPVRRIEVERVKFDPQLLQNPEISGIEYQQGERAGWETRAYLLEKFGHRCAYCGKGEVPFELDHQLPRSRGGSNRVSNLVLACHDCNSAKGNRTAAEFGHPEVEAQAKAPLRDAAAVNATRFALVRELEKLGLPIGTWSGGRTRWTRARFGLSKTHALDALCVGDLAGVDAGKLKTVAITAMGRGRYGRTNVDEYGFPRGYLMRQKQVRGIKTGDRVRAVVPAGFAACGTHTGRIAVRANGQFRMSKVQGIPARFCRILQRAEGYDYAMA

SEQ ID NO: 18620 - protein, 422 aa, unidentified; identical to SEQ ID NO: 16742

SEQ ID NO: 18621 - protein, 475 aa, Blautia sp.; identical to SEQ ID NO: 4128

SEQ ID NO: 18622 - protein, 480 aa, unidentified; identical to SEQ ID NO: 2726

SEQ ID NO: 18623 - protein, 431 aa, unidentified
MPDKVYVISRLGHPLMPCSPAKARHLLDDKKAKVVKRMPFTIRLLYGSTKYIQPIILGVDAGSKTIGLSASTAKEEVFAAEVMPRNDVVENLSTRREFRRARRNRTTRHRKPRSDNRVRSNHERWLAPSVKVKIQEHITSIKRVRTILPISKVVIETAEFDLQLLKAIQEGKPIPEGEDYQKGEMYGSYNVCQYVLWRDNYTCICCGVRGTPKNPVRLHVHHFESRKYGGNAPDNHGTLCDDCHKKFHLGIITDVKLKTRRRQSTRDAAFMGIMRKTLMWRLRTELFIPVAETKGYITKATREKLLVLPKSHTRDALAIAQGRHGFGIKEYAYVEPANHIYTVRPVRHHNRQLHKASILKGGIRKRNQASKYIFGFRLYDKVLYQGKACFVWGRRTSGTFLLRTIDGIKVKDGVSYRNLTLLERSSNYLIA

SEQ ID NO: 18624 - protein, 433 aa, Sutterella sp.; identical to SEQ ID NO: 6555

SEQ ID NO: 18625 - protein, 447 aa, Halolactibacillus sp.; identical to SEQ ID NO: 8439

SEQ ID NO: 18626 - protein, 317 aa, Lamprocystis sp.
MAVFVLDRRGKPLMPCSEKRARLLLTRGRARVHRVVPLQNPQISGVAYQQGTLAGYEVREYLLEQWGRRCAYCTGDGVPLEIDHITPRSRGGSDRVTNLTLACHPCNQAKGNRSAAEFGHPEIEAKAKQSLGDAAAVNSTRWSLFNALTATGLAVETGTGGRTKWNRTRFGVPKTHVLDAACVGVVEGVTGWVAPVLSIRCTGRGTYQRTRVTQDGFPRGYLMRHKQVRGFQTGDLVRATVPSGKKAGVHMGRVAVRATGRFNIQTPQGVVQGIGYRHCCVIQRGDGYGYAQLDATALLPPAIPPRPEGRGFSRRSG

SEQ ID NO: 18627 - protein, 415 aa, unidentified; identical to SEQ ID NO: 5047

SEQ ID NO: 18628 - protein, 431 aa, Aphanizomenon sp.; identical to SEQ ID NO: 11808

SEQ ID NO: 18629 - protein, 424 aa, unidentified; identical to SEQ ID NO: 8578

SEQ ID NO: 18630 - protein, 370 aa, unidentified
LSKVKTMRVFVFNMRGRPLMPCSQRKARLLLRENKAMIYKYHPFTIQLTYTTGETKQDCHIGIDTGSKYIGAAVRSEDKVFWKGEIELRQDIRSNLDTKRIYRRSRRNRKTRYRKPRFLNRKRRDEWLPPSLQSRINHTFHWIDTLSSLVPNPILHIEVGKFDVAKMINPEIHGVDYQHGQTYGFFDERYFVFARDNYTCQCCGKSKNKILNTHHIIYRSNGGTNRVDNLITVCTDCHTSQNHRKGGIFYQWQEQHKKEKQYKDPPFMNTLRKRIFVAYPDAEITYGSETTPKRKAMKLDKTHYNDAIVISGINEIKENPEEWLLIKQFRKKKRSLHEATARKGRKKPNRNQTRNSKNTPYYKGFYLNDK

SEQ ID NO: 18631 - protein, 558 aa, Eubacterium hallii; identical to SEQ ID NO: 5272

SEQ ID NO: 18632 - protein, 523 aa, unidentified
MDKDMIYVLDTNGSPLAPTHRHKHIHMLIKTKQAKVVSYHPFTIQLLYESEIPRVVPNYIGGMDPGRTNIGTNVIDKTGKSVYASHIETRNKDIVVLMKKRSAHRHASRNGERARRIRRARFHNTTFLYGDHYRQLPKCEENVLVHDIKNTEARFCCRTRPDGWLTPTANQLLQTHISAVKQTMKILPITDFVIELNTFDFEKLKNPNIKKWQYEKGALYQTTLHDAIDEQQNHHCLLCQNPIEHYHHVVHRKQNGSDTIDNLVGLCEVCHDKVHKHNEIEAKLLNKKEGLKKEFAGISILNQIFYPFINWLMNIFGEDHVFITNGKETAQFRKTYNVPKTHELDAFCIACSILENSIIDYNCRVFEIKQFRRHNRQLINSTRERKYYSVDRVKTTKTLKNGKTVTKTELKNKTLVATNRKKRTEQKVDSLEEYHTKLRQKYDKIITKKIISGLIVSKSTRGYRNPKTLMPGAVFIYQGKHYVLSGTANEGRYYRAVGQGKKNFPTQDCKVVKQNTGLVYLYE

SEQ ID NO: 18633 - protein, 414 aa, unidentified; identical to SEQ ID NO: 3441

SEQ ID NO: 18634 - protein, 433 aa, unidentified
MSLVFVLSSDRQPLDPCHPARARQLLTRGKAAIFRRFPFTIILTDRTAAERVTHPHRVKIDPGSKTTGIAVVAEGTGRVVWAGELTHRGQQIRDRLSQRRAVRHSRRQRKTRYRQPRFLNRRRPEGWLAPSLQHRVETTLTWVNRLRRYAPIAALSVELVRFDTQQMQNAEVSGVAYQQGTLAGYEVRQYLLEKWNRRCAYCHATGVPLQIEHMTPRSRGGSDRVSNLTLACEPCNTRKGTQTAAEFGYPHLQAQARLPLKDAAAVNSTRWALYQRLVATCLPVEAGTGGRTTFNRTRLGLPKGHWMDAACVGASTPEALDTRGVRPLLIRATGHGSRQMCRMDRFGFPRTSAKQARRVKGFRTGDMVRAVVTTGKKVGTYTGRVAVRASGSFNITTANRTVQGLSYRFVRAIQRNDGYTYQPQPVPAHAEAG

SEQ ID NO: 18635 - protein, 442 aa, unidentified; identical to SEQ ID NO: 2903

SEQ ID NO: 18636 - protein, 424 aa, unidentified; identical to SEQ ID NO: 6292

SEQ ID NO: 18637 - protein, 425 aa, unidentified
VRVFVLNKNRQPLDPCKPARARILLRTGKAKVLRRYPLTIILTEEVNEPITHNHQLKIDPGAKITGLAIVQNNRIIWGAELIHRGFNLRDSLTKRRTLRRSRRNRQTRYRQPRFLNRKRPKGWLPPSLMSRVQNILSWVNKLTRFCPITGISQELVRFDTQKLENPEISGVEYQQGTLFGYEIREYLLEKWHRKCAYCGATDTQLEIEHIVPKSKGGSNRVSNLAISCHSCNQAKSNQEVEQFLSGKPNVLQRILSQAKKPLADAAAVNATWWKLYNELKLTGLPVEVGSGGLTKFNRCSQNLPKTHWLDAACVGTSTPEQLIIKDVKKPLIVTATGHGSRQMCRTDKHGFPVRYVPRFKLVKGYQTGDMVKAVVTKGKKQGVYVGRVAVRTTGSFNVKTNNGLVQGISHKYCQPIHKKDGYAYV

SEQ ID NO: 18638 - protein, 335 aa, Butyrivibrio sp.; identical to SEQ ID NO: 14784

SEQ ID NO: 18639 - protein, 442 aa, unidentified; identical to SEQ ID NO: 7529

SEQ ID NO: 18640 - protein, 451 aa, Akkermansia sp.
CCRLETPSNIGEGSQPVERPRRENLRVFLLNKRGKPLMPCSPAKARLLLKEKKAIVVRRTPFTIQLTIATGESKQPVSLGVDAGYKHVGLSASTEKAELYASEVELRPDVSDLLSARRTLRQSRRNRKTRYRAPRFDNRIRTKRKGWLAPSVENRINAHLSRIGAILRLLPVTKITVETASFDTQLLKNPDISGKEYQEGEQLGFWNVREYVLFRDGHACQHCHGRSKDPVLNVHHLESRRTGGDSPGNLLTLCETCHKALHRREIKLKTKRGQSFRAEAFMGIMRWEVLNRLKASHPELEVHNTYGYRTKHTRIVNGIDKSHCADAFCIAGNLGAKRLGEFFFQKQTRRNNRQIHKLSILKHGLRKRNQAPFEVKGFRLFDKVVCQGEEGFIFGRRSSGSFDVRKLDGTRISAGISYKKLRLLEKRRTYLKEIRKEEALPPLPEGRSLRA

SEQ ID NO: 18641 - protein, 415 aa, unidentified; identical to SEQ ID NO: 13008

SEQ ID NO: 18642 - protein, 420 aa, unidentified; identical to SEQ ID NO: 4588

SEQ ID NO: 18643 - protein, 406 aa, unidentified; identical to SEQ ID NO: 2703

SEQ ID NO: 18644 - protein, 406 aa, unidentified
MVYVQDIDGKPMMPTTRHGKVRRLLKDNKAVVVNTCPFTIKLTYKTSDYKQEIVLGVDSGTKHVGLSATTKSKELYASEVILRSDVVDLLSTRRGLRRTRRSRLRYRKQRFNNRVKSKKDGWIAPSVRHKIDSHIRIISFVYSILPVSKLIVEVAQFDTQKIKNPEISGKEYQEGEQLGFWNVREYVLARDGHKCQHCKGKSKDPILNIHHIESRKIGGDSPSNLITLCETCHKEFHKGNIKLKVSRGKSLRDAAVMGIMKWELYDELKSLYPNVKMTFGYITKYNRINHGIEKSHVSDAFVISRNFDSERLGYYYKRKLVRRHNRQIHKMKAPKGGNKRMNQSPFKVFGFRLFDKVMFQGKERFIYARRLRGIFNIRDINGENKKDISYKKLEYVSHGLISIVAG

SEQ ID NO: 18645 - protein, 418 aa, Bacteroides sp.; identical to SEQ ID NO: 2425

SEQ ID NO: 18646 - protein, 427 aa, Parasutterella sp.; identical to SEQ ID NO: 6030

SEQ ID NO: 18647 - protein, 360 aa, unidentified
MSTSVFVLDKKHRPLMPCRPARARRLLRAGRARVVKRFPFVIRLVDRTVEQSEVQPVLIKLDPGSRETGAAVVRDDEKKRHHALAFFVIKHRGGAIRDALKARSAFRRRRRSQNFRCRSPRFLNRVKPKGWLPPSLRHRVETTLSFVRRMCRYLPVSGIATELVKFDSQKLQNPEVSGVKYQQGTLFEYEVREYLLEKFGRKCVYCGAEGVPLNIDHVVPRAKGGSNRVSNLVLACVSCNQKKGARSLEDFLKGKPEVLARVRRELKTPLRDAAAVNATRWVLFNELKATGLPVETGSGALTKLNRHAFGVEKEHWLDALCVGRLNGVVTRKGLNALEIRCMGRGSRQRTRLTKYGFPRG

SEQ ID NO: 18648 - protein, 412 aa, unidentified; identical to SEQ ID NO: 5980

SEQ ID NO: 18649 - protein, 470 aa, unidentified; identical to SEQ ID NO: 2825

SEQ ID NO: 18650 - protein, 485 aa, unidentified
MLVYVVDHNGQPLMPTTRGAFVRIALKEGRAKVIRTKPFTIQLLYETTSFTQPLSGGTDPGRTNIGEAVLDAGGEVLYNAHITTRNEEIPDLMAERKAHRQASRRGERKVRQRRAIKNGTITFPLEKGRTPRGCEKPIVNKYIRNSEARFVNRKRPANWLTPTTNQLVETHLNAVKDICRLLPVSDWILEINRFAFMRMEDGSIRGADFQNGRLKGYPSVNAYIFALQGGCCVCCGKPLIEHYHHIVPRHLGGSDGPENIAGLCNECHGKVHTGKLSLDKLGQAKKYAALSVLNQAIPFIYDGLVELFGQEHVHICFGWQTSEQRKRLGLGKTHDADAVCIASLGNGSQPRQIPEPYEIKQFRRHNRAIINNQRERTYKLGKETVAKNRKPRFEQRGHSLESFLESLSPVWRLDACQVMEVSKSTRYYNSEGRCMPGTVFYYKGRRYVLSGQHSYGAYFRAVGCGKKNFPARDCRLVGSGGLVYI

SEQ ID NO: 18651 - protein, 346 aa, Arthrospira sp.; identical to SEQ ID NO: 6643

SEQ ID NO: 18652 - protein, 451 aa, unidentified
VLHARNLSITLAKVSYGLYDAGLPQKIIQKERSTYMVYVLSQNGQPLMPTIRHGKVRRLLKEGKANVVKKCPFTIRLTYPSGDQTQEISLGIDSGSKYIGISATTQKKVLYEAEVELRNDISKLLAARRQNRRSRRSRKTRYRKPRFDNRKRKEGWLAPSVQQKVDCHLKVVEDVCKLLPVTRIIAEVASFDIQKIKDPKIHGTDYQQGDQLGFWNVREYVLFRDGHTCRCCKGKSKDKILNVHHIESRQTGGNAPNNLITLCETCHKGYHKGQVKLPKKIKRGMTFKDAAFMGIMRWAFYDRLKEIYLPLGIDVSLTYGYLTKNTRIAHQLPKTHYLDARCISGHPDAISDGIYYHQKKIRCHNRQLHKANTLKGGIRKRNQAEYLVHGFRLFDKVRYQGKDYFIFGRRKSGYFDIRDLNGEKVNKGSISYKKLRLVETRRSYLTERRLA

SEQ ID NO: 18653 - protein, 348 aa, Anoxybacillus sp.
MVFVLDTNKRPLAPCHEAVARKLLKQGKAAIYKRFPFTIILKKSVDESEIKATYRLKIDYGSRHTGLAILRGQEVVWLGQLDHRTDIKERIDKRRAFRRARRNRKTRYRKPRFLNRKRKEGWLPSSLESRVQNIQTWVNRLKKLCPIGYISYENAKFDTQLMRNPEINGVEYQQGTLQGYEVREYLLEKFGRKCCYCGKENVPLEVEHIIPKSRGGTDRVDNLCLACHDCNQRKGSQTAEEFGYPHIQKQVKESLKDASAINSTRWKVYEVLKQTGLDVECGTGARTKMNRVRLDLPKTHYFDACCVGESTTNHLYFKTKEVLFIKAKGQKKCYLSRQKGVVVALVQT

SEQ ID NO: 18654 - protein, 414 aa, unidentified
MPCSPAKARLLLKEKKAIVKRRTPFTIQLTIATGESKQPVTLGVDAGYKHVGLSASTEKAELYASEVELRQDVSDLLSARRALRQSRRNRKTRYRAPRFNNRLRTKRKGWLAPSVENRINAHLSRIEAVLRLLPVTKITVETASFDMQLLKNPDIAGKEYQEGEQLGFWNVREYVLFRDGHVCQHCYGRSKDPVLNVHHLESRRTGGDSPGNLITLCETCHKALHRGDITLKAKRGKSFRAEAFMGIMRWEVHNRLRALHPGIEVSNTYGYRTKHARIANGIAKSHCADAFCIAGNLGAERLCEFFFQKQTRRNHRQIHKLSILKGGIRKRNQAPFEVKGFRLFDKVACQGEESFIFGRRSSGFFDVRKLDGTRISAGISCKKLHLLEKRRTYLTEIRKEEALPPLPEGRGLRA

SEQ ID NO: 18655 - protein, 420 aa, unidentified
MQYVYVLNKHGEPLMPCSPGKARILLKQQKACVVKRTPFTIKLMHGSAGYKQPVTLGVDAGSKHVGLSASTEKRELYSEEFTPRNDVVELLSTRRQNRRSRRNRKTRYRAPRFNNRVHSKHKGWLAPSVEVKIQEHITVIKRICRILPVTLVRVETAEFDTQRLKAMLAGKPLPVGTDYQLGEMYDEYNVRQYVLKRDNYTCQCCGAHTTAKKAVKLHVHHLESRKVGGNAPSNLITLCTACHDNLHKGKVTLDGKKRGKALRDAAFMGIMRNTLLERLRNELHIPVQNTYGYITKLLREQNDIKKSHVNDARCISKHPLAEPCSVCYRTKAIRHHNRQIHKAKILKGGIRKANQAPYIVKGFRLWDKVLYNGQECFISGRRSSGYFALKKLDGTTITNSISFKKLRLLEPATNYLIERK

SEQ ID NO: 18656 - protein, 428 aa, unidentified; identical to SEQ ID NO: 4442

SEQ ID NO: 18657 - protein, 418 aa, unidentified; identical to SEQ ID NO: 6835

SEQ ID NO: 18658 - protein, 430 aa, unidentified
MSKVYVLAMNGQPLMPTTHSGWVYRALRDGKAKVVSKCPFTIKLLYESTGFTQSLTLGVDTGSKYVGSAVINDITSEIVYESQTELRDDIKSKMDRRRQFRRARRNKLRYRPVRLNNRRGSKRKERYSPTLISKFQGHTREIEFIKSILPIRNVILEVGEFDPHLLQDPTLAYHKWDYSKGELYQQENFKQAARVRDGYKCQCCGKKNCRLEVHHLIPRSRGGSDKLANLITLCTDCHHLAHSSEEQLLAFQKKFGKKAKGTLRHATQMNVLRCMLQREYPDAELTYGFITKEVRRVFDLKKSHIIDACCIASRGALYKNNVSNKYKKKCVSNGDYPRTNTTNGKHVIIPKGKIAGFRRYDKVLYNNKEYFVAGRESKGYVTLIDMDNHRPQVERTKRSTGEKYLAKASIKASLVRKVASAKTCVITCGD

SEQ ID NO: 18659 - protein, 430 aa, unidentified
LSWSNYSNIQEVIETLVYVLNNQGNPLMPCKEAKARKLLKQNKAIIAKYEPFTIQLTFECENQTQEVSLGVDAGSKHIGISATTEKQVLYEADVELRNDIVDKLSSRRETRRARRNRLRYRPARFNNRVHSKHKGWLAPSVEQKINSHIQIIKKLHQILPVSKIIVETAQFDIQKIQNPDIKGEQYQQGNQMGLWNVREYVLFRDEHKCQYCKGKSKDNRLNVHHIESRKTGGNSPNNLITLCETCHNDYHQGKIQLNIKRSKSFRDAAFMGIMRKTLLLRLKQIYPNVQETFGYITKSTRIENNLPKEHYIDARCISGNPLAKPFGYYLYQKCIRRQNRKINRDKFIKGGIKKKNRLAGDVFGFGLFDTVGYQKKRYFVFGRRKRGEFDIRTLDGEKVNNGSIRYKKLKLIQKNNNILTERRLSVAPQL

SEQ ID NO: 18660 - protein, 413 aa, unidentified; identical to SEQ ID NO: 8694

SEQ ID NO: 18661 - protein, 405 aa, unidentified
GRRCRRQRRAKANGTISKKCVKHDTAQNGSVSKCAKEIGVIKRHLPGCEKDVLCICIKNKEAKFSNRTRPEGWLTPTANQLLQTHINLVKKIRKFLPISDAVLEINKFAFMQLDNPNIQKWQYQQGPLYQKANLEEAVSEMQEHHCLFCKKPIAHYHHVVPQSENGSDTIGNIVGLCTKHHDLVHKDTEWQKKLAKKKTGLNKKYGALSVLNQIIPALTKELSSLFPKHFFATNGKSTYDYRAAHGVSKDHWLDAYCIACSVLPNDVCDSSINNRVPYELKQFRRHDRRALHKENMSRVYTLNGKKVATNRHKATEQTADSLEEFRQNHPDDVCKLKVKENHSEYRNPKRNFPGCVFLVGKRTHVMQGTSGSHNGKADGYYDTNGNSYSSGKCKFVAKNEGIIFA

SEQ ID NO: 18662 - protein, 419 aa, unidentified
MVYVLDINGQPLMPTARHGKVRRLLNSHLAKVVKRCPFTIQLLYQSTKETQSVSLGIDAGSKHIGLAATTEKKDVYQEELIPRNDVVKLLSARRILRRSRRNRKPRYRKPRFNNRVHSKHKGWLAPSVEVKIQEHITAIKRICQILPISDIHVETAEFDLQRLKAMEEGRPLPVGTDYQLGEQYDFYNTRQYVLHRDGYTCQCCGAHDNNVRLHVHHIESRQTGGNAPNDLITLCEHCHKALHEGKLKLPKGKKRGKSYRDATFMGIMRKTLLERLKKEVDVPVTGTYGYITKYWREKAGLEKSHINDAVCISKHPYVEPLDTYYLTKAVRHHNRQIHKVNFSKGGIRKRNQAPHLVKGFRLFDKVLYQGKECFIFGRRVSGRMDVRLLDGTRINASVGYKNLKLLELRKAYLTERRTC

SEQ ID NO: 18663 - protein, 434 aa, unidentified
VVLMDAWDIIVVLNKRGKPLMPCSPAKARLLLKEKKAIVKRRTPFTIQLTIATGESKQPVSLGVDAGYKHVGLSASTEKAELYASEVELRQDITDLLSARRALRQSRRNRKTRYRAPRFDNRIRTKRKGWLAPSVENRINAHLSRIETVIRLLPVTKISVETTSFDMQLLKNSDIAGKEYQEGEQLGFWNVREYVLFRDGHVCQHCHGRSKDPVLNVHHLESRRTGGDSPGNLITLCETCHKALHRGEIKLKAKRGRSFRAETFMGIMRWGVLNRLKASHPKLEVHNTYGYRTKHARIANGIAKSHCADAFCIAGNLGAKRLGEFFFQKQTRRNNRQIHKLSILKGGIRKRNQAPFEVNGFRLFDKVACKGEEGFIFGRRSSGYFDVRKLDGTCISAGISYKKLHLLEKRRTYLTEIRKEEALPPPPEGRGLRA

SEQ ID NO: 18664 - protein, 417 aa, unidentified; identical to SEQ ID NO: 2758

SEQ ID NO: 18665 - protein, 453 aa, Solobacterium sp.
MSVAVLSSTGRKLMPTSNYRARKLLKSHRAAIECYRPIFTIRLTDRKEGNTQPIEYACDTGYQHVGVSIKSEKHEFVHAQYDMLSDETERHNDCRKYRRTRRNRLRYRKPRFDNRSKKNKEMPPSLRHRKENQISLFESFCKVMPITSATFEMGKFDTQLLQAIANGKPLPEGKDYQQGSKYLYQTEREAVFGRDHYTCQVCGKSVKDGVILNTHHIGYWKGYRSNRISNLLTVCEHCHTAKNHRPGGKLWGLEPKSTNLAPAAYMSTVRWAMYRDLVLMHPEIDIHIQYGAKTSVTRKSLHLAKTHANDAYCIGSLRPKHRAAELVYQKKRRNNRILSRFYDAKYIDIRDGKKKSGSALSCGRTNRRESRRSDKNQRIYRGKKCSSGRTSIRKRRYAYQPGDAILFRSQRFAVNGAHCNGTRVILNTGKSVKTADLTCTKKEGGWRFLPAQA

SEQ ID NO: 18666 - protein, 442 aa, unidentified; identical to SEQ ID NO: 3791

SEQ ID NO: 18667 - protein, 331 aa, unidentified
LLSTRKQNRRSRRYRKTRYRAPRFDNRVHSKHKGWLAPSVEVKIQEHITVIKRICKILPISLVRVETAEFDTQRLKAMLAGKPLPVGTDYQLGEMYDEYNVRQYVLKRDHYTCQCCGAHNTAKKVVKLHVHHLESRKTGGNAPSNLVTLCTTCHKNLHKGKVTLDGKERGKPLRDAAFMGIMRKTLMARLKEELPIPVQGTYGYITKMRREQNDIKKSHTNDARCISKHPLAEPCSVCYRTKAIRHHNRQTHKANFSKKGIRKRSQMPYLVEGFRLWDKVLYKGQECFVSGRRSSGSFALKKLDGTSISKGVTFKKLRLLEPATNYLIERM

SEQ ID NO: 18668 - protein, 442 aa, unidentified
MVTVQQSTHHLPFGRVFIRRNLFMVYVISQDGKPLMPCSDPIARLLLKQGKAKVKKREPFTIKLTYETTNYTQGLTLGVDTGSGTIGTAVSKDNGDIVYMSEVVVRNDITDKMTQRAKYRRNRRNRKTRYRKARWLNRASSIKKDRFSPTMQSKLHSHVREIEYIQSILPVTEMVFETGQFDMHLMKNPSLANPKVRPWGYQKGANYGFENTKAMVLNRDNYTCQCCKGKHKDSKLEVHHIVFRSQGGSDEESNLLTLCHTCHKDLHSGKINPKLSGKVKGNLKYATQMNSIRKQLFRFYPNAIETFGYVTKVNRLQLGVAKEHYYDACTIATQGNAFNVKSNLYKKKCVSDGDFQKTKGIRSEQPIVTDKICGFRKFDKVRYFGNDYFIKGRMSTGYAILMDIDGNKIDFSTMPRGYKTPKLSNCKRITARSTVMTQVKVV

SEQ ID NO: 18669 - protein, 482 aa, unidentified; identical to SEQ ID NO: 16365
  source 1..482: note = Firmicutes bacterium UBA5625

SEQ ID NO: 18670 - protein, 412 aa, unidentified; identical to SEQ ID NO: 3155

SEQ ID NO: 18671 - protein, 512 aa, unidentified
MSTVYVLNKDGKPLMPTTRGGHVRYLLKEKKARVVTSKPFTIQLLYETDDVVQPLYLGIDPGRTNIGVAVVKTDGTAVFTAHLETRNKEIPKLMQGRKKARRARRTNGRRCRRQRRAKANGTISKKCVKQTTAQNGSVSKRAKKIGVIKRHLPGCEKKVLCIGIKNKEAKFSNRTRPEGWLTPTANQLLQTHINLVKKIQKFLPISDVVLEINKFAFMQLDNPNIQKWQYQQGPLYQKASLEEAVSEMQEHHCLFCKKPIAHYHHVVPQSENGSDTIGNIVGLCTKHHDLVHKDTAWQKKLAKKKTGLNKKYGALSVLNQIIPALTKELSSLFPKHFFATNGKSTYDYRAAHGVSKDHWLDAYCIACSILPKDTCDKNINGRVPYKLKQFRRHDRRALHKENMSRVYTLNGKSVATNRHKAIKQTTDSLEEFRQRQPNDVYKLKVKEHHPEYRNPKRNFPGCVFLVGKHTHVMQGTSGSHNGKADGYYDTNGNSYPSGKCKFVAKNKGIVFA

SEQ ID NO: 18672 - protein, 456 aa, unidentified; identical to SEQ ID NO: 4017

SEQ ID NO: 18673 - protein, 401 aa, unidentified
RRQRRAKANGTISKKCVKQTTAQNGSVSKRAKDIGVIKRRLPGCEKDVLCIGIKNKETKFTNRTRPEGWLTPTANQLLQTHINLVKKIQKFLPISDVVLEVNKFAFMRLDNPNIQKWQYQQGPLYKKESLESAVSEIQEHHCLFCKKPIDHYHHVVPQHKNGSNTIGNIVGLCAKHHDLVHKDSAWEKKLAKKSTGLYKKYGALGVLNQIIPTLTNELSSLFPKHSFVTNGKSTYDYRAAHGVSKDHWLDAYCIACSVLPSNVCDSNINNHMPYVLKQFRRHDRRVLNNENMNRVYTLNNKAVAINRHKAKDQKTVSLEEFRKEHPDDVCKLKVKEHHPTYRNMNRNFPGSVFLVGKQIHVMQGIASSKDGKATKYNDTSATAIAAGKCKFVAKNTGILFV

SEQ ID NO: 18674 - protein, 423 aa, unidentified; identical to SEQ ID NO: 3951

SEQ ID NO: 18675 - protein, 415 aa, unidentified; identical to SEQ ID NO: 4319

SEQ ID NO: 18676 - protein, 397 aa, unidentified
MDTGYIHIGTSVKSEKHEYLGKQIDTLTDERRKHDACRMYRRQRRNRKRYRQPRFNNRERDDGWIAPSLEHKKTIHIQAISRICKVMPVTDITLEMGNFDTQVLKAREEGKPLPQGLDYQHGERYSVTTLREAVFLRDGYTCQCCGRTIKDGAILHAHHVVYRSQGGTNRISNLITVCDKCHTPANHKPGGKLYGWKPKVASFKGATYMTTIRWKLYNEVKALFPDIDIHITYGAETKERRRIFDITKSHVNDAFAMGQFHPKHRLKPVCYKKKRRNNRCLEKFYDAKYIDSRDDKKRTGHELFNGRISRNHKKDSENLRQYRRQKISAGRRTIRKQHYAIQPHDIVIFDGEKFETSGCHNNGTRAILLPQKKSVAIKKLNIYRYAGGYFKSAFNKK

SEQ ID NO: 18677 - protein, 449 aa, unidentified
MVYVLSIDGKPLMPTSNAKARRLLKQKKAKVRELTPFTIQLTYKTKTEYTQPITLGIDSGYSNVGFSAIANNSELISGELKLLQGMKERLLERARYRKIRRSKLRYRKARFDNRTKSKPKGWLAPSLQYKLDSHIKFIDYLYSILPITRCVVEVANFDIQKIKNPDIQGEEYQQGEQMGFWNLREYIIHRDSHKCQNPNCKNRDKEQILETHHIKYKHLGGTDNPNNLITLCTKCHTSQNHKEGYFLWDWCQQGKKVRGFKDATFMSMIRWYLVNLLKERYSNIHVTYGYITKSHRINNKIEKTHYNDAFCIAKGINQKRSIEIFKVKQSRRNNRNLEMFYDAKYIDTRTGEKVSGSELNNGRRTRNKNLNSENLHQYRGQKLSKGQRRIRTKRHFYQPNDLVKYNGQTYSVRGTQNNGAYIRLNEIKKVPRVDLLTPYKFNKGIVWGM

SEQ ID NO: 18678 - protein, 430 aa, Microcoleus sp.
MSNFVFVLDTNKQPLEPVEPGQARRLLKLAQAAVYLRYPFTIILKYAVSRPKTQPAQLKIDPGSKTTGLAIVQGNQVLWGAELTHRGQQIKNDLESRRAIRRNRRNRKTRYRKPRFLNRTRKPGWLPPSLESRVKNIVTWVNRICRYVPITGISQELVKFDLLAMQNPEISGKEYQQGELAGYEVREYLLEKWGRKCAYCGIENLPFEVEHIHPKSKGGSDRVSNLTLACRGCNQAKGNQDIRDFLSKKPDILSRILKQASQPLKDATAVNSTRWALFQQLKQTGLPIEVSTGGRTKYNRTRLGLPKTHWLDAACVGNVEVLQVFTEQPLLIAAKGWGSCQMCTTNKYGFPVKHRTRCKTFFGFGTGDMVSAILPFGKFAGTHVGRLTVRESGVFEMRTPLGKVSPVRHKYCKSIHRNDGYMYAFSTNVQ

SEQ ID NO: 18679 - protein, 424 aa, unidentified; identical to SEQ ID NO: 3434

SEQ ID NO: 18680 - protein, 436 aa, unidentified
DGKAKIIKHHPFTIQLLYDSETNIQPIEICEDVGYNYIGISVKSQSHEYVSAQYDTLQDEKDCHDSCRKMRRTRRNRLRYRKPRFDNRKHDKGWLAPSLEHKKELNVNVIKMYCEVMPITHATVEVGSFDTMLVKAIEEGKATPESTDYQKGPRYNLASLREAVFYRDNYTCQVCGRKANEGAILHVHHMFYWKGRHGNSLNELVTVCEKCHTPANHQKGGKLYGFGENIKFANLSGAAFMNTVRWQIVNELYAAFGKPFVTFTYGAMTKEKRIALHLDKSHSNDAYAMGNFHPVDRCAFEHYEKVKRNNRILEKFHDSRYIDIRTGKEAKGKELFNGRISRSHKKDSENLHKYRGKRIRKGYRALRRKKVALNSGDLVSLNGETLIVHGTHTNKKGNVRVEFKVAALNGKKSASLKKLKIVKTSTPMHSAWAKVS

SEQ ID NO: 18681 - protein, 408 aa, unidentified
MVYVQDINGKPLMPTTRHGKVRRLLKDKKAVVVNLCPFTIRLTYVTSDYKQEIVLGVDAGTKHVGLSATTKSKELYSSEVILRNDIVDLLSTRRELRKTRRNRLRHRKHRFNNRIKSRRPGWTAPSVKYKVDAHIRVIDNVCSILPISRIVIEVAQFDTQKINNPNISGKEYQEGDQLGFWNVREYVLARDGHKCQHCKGKSKDPVLNVHHIESRKTGGDSPSNLITLCETCHKEYHKGNIDLKIRRGKSLRDAAVMGIMKWRLYEELKSKYDNISMTFGYVTKYNRIKHGIEKSHVFDAFVISKNFDAIRLGYYYKVRLVRRHNRQIHKQKIPKGGIKRLNQSPFEVFGFRLFDRVMFENSYYFIFARRKTGSFNIRDIDGKNQRDITYKKLKLSRCKRFMVQKEMD

SEQ ID NO: 18682 - protein, 426 aa, Parasutterella sp.; identical to SEQ ID NO: 3045

SEQ ID NO: 18683 - protein, 450 aa, unidentified
  source 1..450: note = uncultured archaeon
MQKLLAKLKNVPTGAPQACSSTSSVLNRDQNLSAQDIVLTNNNLEVDLPASNSSQGLRVPVINMRGKPLMPCRRGVARKLLEQKKAVVINLFPFVIKLKQATGETVDRLVLGVDIGYRWNGFSIVGKKRELFSGTLELDGKTSERLATKAMYRRGRRNKLWYREPRWNNRTRVEGWLPPSVQKRYDSILRYIKKMCSWYPIAEIILETASFDIQKINNPEIQGVEYQQGDLYGYQNMRAYLFTRENGLCQYCGKEFNLKDSSHIHHIIPRPAGTDKPDNLALLHEKCHKALHKKKKPTGLKPNKQFKPETWMSIVRNRFVKDLPESEITFGYITNLVRNSLGLPKTHFNDAFVIAGGTDQERVESVEIKQKRKNNRCLQLNRKGYKPSIRKQRYSLQPGDLIKIKGSNKIYVVKGVHGYGKMVRVKNGDKFLDFKAKLVSWCYHQKTIMY

SEQ ID NO: 18684 - protein, 496 aa, Streptomyces sp.; identical to SEQ ID NO: 4777

SEQ ID NO: 18685 - protein, 470 aa, unidentified
VSEYIYVIGVDGDPQMPTKRKRHVEQLLQAGRARVFRQVPFTIQLTYENKPVLQPITIAEDPGRSNIGMAVVSLSGELLSAAVVQTRNKEIVKLMEKRKQHRRASRNGERKTRQRLAKKCYTMLKAGLLMRKLPTYGKDKRVQCNVIRNTEARFCNRKRSDGWLTPSAEHLVRTHINLIHKMQKFLPITDIAIEINRFAFLSLEDPSISGVDFQNGPLKGYDDLNAAVEDLQDGHCLMCNSPIEHRHHIVPRSMQGSNTIGNIAGLCCKCHEKVHKDSAFEDHLKKKKTGLNKRYVAVSVLNQAIPFICKRLEQEFGKEHVHYCSGRDTSMVRRSFGYHKTKEEQLHEVDAWCIAVLSLQQIPEKAPSFDHVHEILQFRRQDRSIIDAQTSRMYYHEGKKVAKNRKKAEGQREDSLQEWRKRQVERYGEEQTRKMISQLKVKKSIRRYNRLDRLMPGAVFYYQDVRYVMR

SEQ ID NO: 18686 - protein, 531 aa, unidentified; identical to SEQ ID NO: 12018

SEQ ID NO: 18687 - protein, 470 aa, unidentified
MSVFVVGLNGCRLMPVSERKARLLLDDGKASVYRKVPFTIKLNYKTGSTTQPGYLGIDTGSQHIGVSVVRKDGTVLHKEEISLRDSMTKRKLLEAKASLRRGRRYRKTRYRHPKWRSKTKRVYCEVPDKKRRHWKKQKSTFTSGRPEGWLPPSLQSKTDHHIRWIKKLQNLLPEGYRLSIELGRFDPARMKDPEIHGELYQKGPQYDYENVRAYVLDRDRYTCQVCRRKGRKLHVHHILYRSQGASDTPQYMATVCSSCHTTENHLPGGILYQWMQEQKKFTRGLRDATFMNILRKRLMKTFPDAVFTYGNITKVDREKLKLPKSHGNDATAIALVRTGVTSVKDEEPVLYIQQVRRKKRSLHEETPRKGRKEPNRTAARNSKNTKAVTVTKRRDGKKVSVTACLFDRVELNGKKGWITGFTGKACRIVDTEGNYVAATDKYTQVNISSIRILHHTGNWVTGLKRNVGKR

SEQ ID NO: 18688 - protein, 424 aa, unidentified
MSNYVFVIDPDKQPCNPVHPAKAQLLLNQKKAAVFRRYPFTIILNEKQKDVEANPLTLKIDPGSQTTGIAILNGENVVWGAELAHRGQQIKSDLESRRAIRRNRRNRKTRYRPARFLNRKREKGWLAPSLQHRVDTTLTWIKKLIRYCPVTNIVQELVRFDLQKMENPEISGIEYQQGELQGYEVREYLLEKWNRQCAYCGAKNIPLQIEHIHPKSKGGTNRISNLCITCEPCNLAKGTQDIKDFLSGKPSILKRVLSQAKSPLKDAAAVNSTRWALLNALKSIGLPISTGSGGQTKFNRTRLNLPKTHWIDAACVGTIESLRIITKQPLLIKATGHGCRQMCRTDKFGFPSRYVPRLKFIKGFQTGDIVKAIVTSGKKIGTYVGRVAVRCSGSFNISTPQLIQGIGHKYCRAIHRKDGYSYSF

SEQ ID NO: 18689 - protein, 545 aa, unidentified
VQFAWWLCHPKPSDNIEDVNHETALMLLQIKAGTETFGTAPCGSGPKAEGVSPERKAMNTVAVVTNTNKPLMPTSPYRARKLLSSGKAKIVKHRPFTILLVNRSDGNVQEIEYKSDTGYLHVGISVCSEKREFVREQRDLLPDEREKHNDRRKYRRTRRKRKRYRKARFDNRIGKIRKAEKNKHVWLPPSLDHKVDAQVQLFLRLYQVMPIKRAVFEMGQFDPALMKALEKGEAAPQGIDYQMGERYQIATRRAAAFTRDRYACVFCGRSIKDHAILHVHHIGFWKQDRSNRLDNLATCCEQCHTSENHRPGGILYGVEPKLESLASATYMNVVRFELLQRLKEAAPDVEFHISYGAKTSVIRKQRSISKSHTNDAYCLGQYFPKLRAEEIGFQKIRRNDRILQKFYDAEYLDSRDGTTKKGKELTNGRISRNHMKDHKNLHQYRGKKLSKGRVTIRRGRSSLKPGGLVRFDGEVLTVHGTHRSRRKNKAGHIKVSVNVEFERPSKTGRKSAALSKCQIISQSYNTGWKKIQLRKEEQGKIAAVV

SEQ ID NO: 18690 - protein, 557 aa, unidentified
MIYNLVSTRERSFMKQKKQKVMVYILNKKGKPLMPTTRCGHVRKLLDSKKAVVVNSNPFTIRLKYDTPNGIQDVFAGIDSGRENIGSGASNEDGDCLYLGELKTSNKSIKLKMTERAGFRKERRRHDRQNKQRKARKDHTEIQNGNADICRTTISCKSVQISYPAAEKSVTHKIIRGKEGKFANRHRDEGWITPSARQLVQMHMNDLKSMCKILPISHVTLERVAFDFQKLENENIKVWEYGKGKLYGYDSPEEYIHDVQNGKCLVCGKPHIDYLHHIIPRSKGGSDKVSNIAGLCYDCHYGPMGVHNCQNTQDRLPELKSEANKQYKVSLLNSVMPVLIEEMDKFCKANSIMFSICEGHDTAKVRDMYDLQKDHCFDGFAISLVGRNVESVDVIPDRIYQKQRYKKKSKNIIQKRNCREYYDDKKLVAVNRHKGTDQKADSLEEYMNTYAETHTADECKNQFESLTVKPARRTYTFHKEGRICPFHIGDKVRYEKKNKIKGNTKVDTFICEGIRFVKDENKAEVKHNKTKSKKMKFCRVLESGCTPYVDYRKLALM

SEQ ID NO: 18691 - protein, 496 aa, Streptomyces sp.; identical to SEQ ID NO: 4777

SEQ ID NO: 18692 - protein, 420 aa, unidentified; identical to SEQ ID NO: 15186

SEQ ID NO: 18693 - protein, 415 aa, unidentified
MENKIEYCFVVDKNNRPLAPTKVNKGWYLIRKGRAKLKSKYPMVIQLEKEVEPDDEDESHMVCGIDDGSSHVGIAIVQKCPSKNKVVFKGTIEQRQDVKHLMDVRRGYRQYRRYHKRYRKPRFNNRASSKKTNRLAPSIKQKKDSILRVLYQLNKWINIKEYYLEDVAIDIRAMTDGYKPYNWQYQKNNRLDENLRKATILRDSCKCQECGKTNTVLEVHHIRAKRFGGANTIGNLITLCSSCHQKTEGKEREFEERYFTKIKSKPKRFDYAMHVMQGKNYLRENIKQLGILHLTTGGDTANKRIEWNIEKSHSNDAICITNCFPDTCNIKEWMIKPMRRKSKSKTDNVLGIKHRDLVEYTYRNGETHKGYVTALYPHLNALNFQSPTKHCKKVNVRKCRLLWKYNKIYWLDSVI

SEQ ID NO: 18694 - protein, 423 aa, Arthrospira sp.; identical to SEQ ID NO: 3221

SEQ ID NO: 18695 - protein, 415 aa, Bacillus sp.; identical to SEQ ID NO: 5390

SEQ ID NO: 18696 - protein, 415 aa, unidentified
MVYVVANDGQPLMPTERHGKVCRMLRSEMAKVIKKCPFTIQLQYESEKNVQPVSLGVDAGSKHIGISATTKTKVLYESDVELRDDIVKLLATRRQLRRSRRSRKTRYRPARFDNRKRKEGWLAPSIRQKIGSHLTVVANVCKILPINQIIVETASFDIQKIKNSDIQGTEYQQGEQMDFWNVLEYVFFRDGHTCQCCKGRSKDKILNVHHIESRKTGGNAPNNLITLCETCHKGYHNGTVILPKNIKRGMKFKDAAFMGIMRWAFYNALREQYEPAIPVSMTYGYLTKNTRIEHGLLKEHYIDARCISGNPDAVSDGTYYYQKKVRCHNRQIHKQTILKGGIRKSNQAEYLVKGYRLFDEVRYQGREYFIFGRRKSGFFDIRTLSGEKVNKGSISVKKLTFVDTRKNYLIERRTV

SEQ ID NO: 18697 - protein, 461 aa, Parasutterella sp.; identical to SEQ ID NO: 3646

SEQ ID NO: 18698 - protein, 421 aa, unidentified; identical to SEQ ID NO: 2846

SEQ ID NO: 18699 - protein, 413 aa, Blautia sp.; identical to SEQ ID NO: 3616

SEQ ID NO: 18700 - protein, 427 aa, unidentified; identical to SEQ ID NO: 7675

SEQ ID NO: 18701 - protein, 408 aa, unidentified; identical to SEQ ID NO: 3192

SEQ ID NO: 18702 - protein, 406 aa, unidentified; identical to SEQ ID NO: 16853

SEQ ID NO: 18703 - protein, 413 aa, unidentified
  REGION 1..413: note = IscB polypeptide
MQKVYVQNKDGEPLMPCTPAKAKHLLRDKKAGVIHLTPFTIRLNWDCENNKQEIIVGLDTGAVNVGCSAVSNNKCLYASETKLRIDISKKMQRRSKYRRNRRTRLLRYRPARFDNRTRPEGWLPPSLKSKLDSTVKIVKQLSEILPISKVVVEIAKFDTQKLQNPEIKGKEYQKGVSEGYDNVRAYVFERDKYTCQICKKKLGVLQIHHILQRKDGGSDRPQNMVTVHKSCHKDFHLGLIKHKFRKPKEYKMATQVTILKDFIVDGLKKDFDVEVTFGHITKRNRLRLNLPKSHCFDAVAICNPKKIERINKIFQRVCITQRRYQMTKGIRSEKKLPSGKVFGFNQWDKVRLQDEQVGFIKGRRTRGNFDICDINKKNINHSINYTKLQKLSSNNVMEVQAIPPTAKAVGTLA

SEQ ID NO: 18704 - protein, 518 aa, unidentified; identical to SEQ ID NO: 6562

SEQ ID NO: 18705 - protein, 424 aa, unidentified; identical to SEQ ID NO: 3351

SEQ ID NO: 18706 - protein, 424 aa, unidentified; identical to SEQ ID NO: 5075

SEQ ID NO: 18707 - protein, 443 aa, unidentified; identical to SEQ ID NO: 15325

SEQ ID NO: 18708 - protein, 431 aa, unidentified
MPNKVYVINKHGRPLMPCSPAKARHLLDDGKAKVKKRTPFTIQLVYGSSGYTQEVILGVDAGSKTIGMSASTTKEELLSAEVKPRNDVVDLLSTRREFRRARRNRKTRYRKPRFDNRVRSKHKEWLAPSVEVKIQEHITSIKRVCRILPVSKVVVETAEFDLQLLKAIADGKPVPQGEDYQKGEMYGHYNVRQYVLWRDDYTCQCCGAHATKKKEVRLHVHHLESRKVGGDAPDNQVTLCESCHEKLHKGLIAEKDFKKRKRRSTRDATFMGIMRKTLMQRLCSELPIPVIETRGYITKATREKLLVLPKSHTNDALAIAQGKRGFNVGYLPEIAQIDKIYTIRPVRHHNRQLHKAAILKGGIRKSNQAGKYVFGYRLFDKVQFNGQDCFIWGRRTTGIFTIKTINGKMIKDGISFKKLKLVEKSTSYLIA

SEQ ID NO: 18709 - protein, 414 aa, unidentified
MPCSPAKARLLLKEKKAIVKRRTPFTIQLTIATGETKQPVSLGVDAGYKHVGLSASTEKAELYASEVELRQDITDLLSARRALRQSRRNRKTRYRAPRFDNRIRTKRKGWLAPSVENRINAHLSRIEAVLRLLPVTKITVETASFDMQLLKNPDISGKEYQEGEQLGFWNIREYVLCRDGHVCQHCYGRSKDPVLNVHHLESRRTGGDSPGNLVTLCETCHKALHRGEITLKAKRGQSFRAEAFMGIMRWEVLNRLKASHPELEVNNTYGYRTKHARIANDIAKSHCADAFCIAGNLGAERLGEFFFQKQTRRNNRQIHKLSILKGGIRKRNQAPFEVNGFRLFDKVACKGEEGFIFGRRSSGFFDVRKLDGTRISAGISYKKLHLLEKRRTYLTEIRKEEVLPPLPEGRGLRA

SEQ ID NO: 18710 - protein, 411 aa, unidentified; identical to SEQ ID NO: 2663

SEQ ID NO: 18711 - protein, 480 aa, unidentified; identical to SEQ ID NO: 2726

SEQ ID NO: 18712 - protein, 425 aa, unidentified; identical to SEQ ID NO: 7553

SEQ ID NO: 18713 - protein, 512 aa, unidentified; identical to SEQ ID NO: 4350

SEQ ID NO: 18714 - protein, 421 aa, unidentified
MLVYVLSKNGQPLMPTHRCGFVRRLLNSQKAKVVRRCPFTIQLQYDTDCKTQPVTLGIDAGSKHIGVSATTESKVLYEADIELRNDIVDLLATRRQMRRARRSRKTRYRKARFDNRKRNDKWLAPSIQHKVNCHLEAVRFVHKLLPISKIIVEVASFDIQKIKNPLITSTDYQNGELLDWKNVREYVLFRDSHICQCCKGKSKDPVLQVHHIESRKIGGNAPNNLITFCKTCHNGYHHGTVKLPAKIKRGMKFNDATFMGIMRWGFYNQLKSLYPDVSLTYGYITKDIRISNGLAKTHFIDARCISGNPLATSDNTVYFLKKRRRHNRQIHKFNILKGGRKKRNQAAYLVKGYRLFDKVNYNRKEYFIFGRRASGFFDIRTLSGEKVNKGSISCKKLKLLEASKGYLTERRNAFLSPLNSV

SEQ ID NO: 18715 - protein, 470 aa, unidentified
MVGGVSQIFQKKEVSVLDTVAVISASGRKLMPTNSYRARRLLKSKRAVIYRYRPVFTIKLADRTDGYIQSIEYKCDTGYQNIGISICSDTKEFVNEQRDLLKDEVKRHSNSRKYRRTRRNRLRYRKKRFDNRRGMISRDGFAPSIRNKRDVHVRLYEEYYKVFPITKAVFEMGQFDTQVLKAVEAGLPVPAGTDYQRGEQYGYATLREAVFARDSYTCVCCGKSAIKDGVKLRIHHIGYLSGDRSNRMANLGSVCESCHTSKNHKPGGKLYSLKPELKTFKGATFMTTVRYSMVKQLKAATPDVDIRVTYGAATKLARKALNVKKTHSNDAYCMGEFHPEHRSDFKHYRKCRRNSRVLSRFYDAKYRDLRDGSVKTGSQLSCGRTNRRIPRHTELNERIYRGHKISKGKLVVRRQHYQYRTGDTVWAEGKRCAVKGIISNGTRIALNERNPVSVNKIDKTVHTGGWAKAS

SEQ ID NO: 18716 - protein, 418 aa, unidentified; identical to SEQ ID NO: 4327

SEQ ID NO: 18717 - protein, 426 aa, unidentified
MVFVLNRSKKPLNMITNAEARILIKKKLAVIHKVYPFTIRLKDNSCVSNDRAYTVKLDPGSRHTGVAIVDDKDQVVMLAELEHRGHLIKRNMDSRRAVRRHRRNRNTRYRPARFLNRKIPKGWLAPSVKSRADNVINFIKKYKKLINIDKVMIEHVSFDTAQMSSNTKLYGVKYQQGPLYQQKLRSFIFSRSNGKCVYCGAQAEEIDHVIPRAKGGTNSVYNLVASCRACNQMKSNLSLKEFGKKINKNFSKLEPKKLPKDAAIVQAARNYMVKEVTKLVFNTTLHDAWMTKYNRDELGLPKEHYYDALSVGEVPNKFDFLTDKVFQISAKGRGSRQMCLMNKYGFPRTKSKGSKLVEGFQTGDMVKVIVPSGLKQGEYLGRVVVRSSKCFDVKTKTKTVQGIWHKYFHIVQRGDGYLYNYERRAI

SEQ ID NO: 18718 - protein, 413 aa, unidentified; identical to SEQ ID NO: 3620

SEQ ID NO: 18719 - protein, 367 aa, unidentified
VSEMTSYAFVLDANGKQLAPAKEQKAWFLIRKKRAALVSKYPMVIQLKKEIPENEICKDEIRCGIDDGGLHVGIALVQKCKTKNKVVFKGTMEQRNDVKHLMEVRRGYRRYHRYHKRYRQARFDNRKSSKREGRIAPSILQKRQATIRVIHWLNKWINITNYWLEDVSVDIRALTDGYQSYRWQYQKSNRLDENIRKAAILRDGGKCMECGKSNCRLEVHHIKPKRRNGSNTLDNLITLCESCHQKTEGQEELYMDRYFSLLKSSDNKNLNYAQHVMIGKMWLRKQLSGLGVLYLTSGGDTANKRIDWNIEKSHANDAVCITDLRPDTCDVKEWTMKPMRRQSKAKTDHVLGCLLYTSPSPRDRSLS

SEQ ID NO: 18720 - protein, 430 aa, unidentified; identical to SEQ ID NO: 7436

SEQ ID NO: 18721 - protein, 406 aa, unidentified; identical to SEQ ID NO: 3475

SEQ ID NO: 18722 - protein, 447 aa, unidentified; identical to SEQ ID NO: 5309

SEQ ID NO: 18723 - protein, 242 aa, unidentified; identical to SEQ ID NO: 15640

SEQ ID NO: 18724 - protein, 396 aa, unidentified; identical to SEQ ID NO: 4508

SEQ ID NO: 18725 - protein, 462 aa, unidentified
MSVLVIGRNGRALMPTNPRKARLLLKKKTASVVCRHPFTIQLLYKTGCATQEGCIGIDTGSQHIGVGITCGDRVILKDEHALRSSMEKRSLLATRAVMRRGRRYRKVRYRKPKWRHHTKRMYFEKANRRGQHWRKVKTTTQSPRLKGWLPPSLQSKCDHHFRIIDRYLKYLPDPITRNLVIEAGRFDMARMNDPTIHGEMYQRGPMYDAENLRAYIFARDNYQCACCKAKAGTTRKADGTTVKLVAHHILFRSRGATDNPKYIISVCDHCHTTKAHQPGGILYSWMENNKKVARGLRDATFMNILRKRLFARYPQAAFTYGNITAADRKQLRLPKSHANDAVAISLFGKEASTVKNICQTMHYKQIRKSKRSLHEAIPRKGRKNPNTKAVRNKKNTTQANGFKLWDSVLADGKKLFICSFTGTSAYLIDKNGCYISQPGKTYKQWPLSKLKRLHPNGNWLMA

SEQ ID NO: 18726 - protein, 442 aa, unidentified; identical to SEQ ID NO: 3234

SEQ ID NO: 18727 - protein, 462 aa, unidentified
MSVLVIGRNGRALMPTNPRKARLLLKKKTASVVCRHPFTIQLLYKTGCATQEGSIGIDTGSQYIGVGVTCGDRVILKEEHELRSSMEKRSLLVARAAMRRGRRYRKVRYRKPKWRHHTKRMYFEKPNRRGQHWRKVKTTTQSPRPKGWLPPSLQSKCDHHFRIIDRYLKYLPDSITRNLVIEVGRFDMARMNDPMIHGEMYQRGPMYDAENLRAYIFARDGYQCACCKAKAGTTRKTDGTTVKLVAHHILFRSRGATDNPKYMVSVCDHCHTTKAHQPGGVLYSWMERNKKVTRGLRDAAFMNILRQRLFARYPQAAFTYGNITAADRKQLRLPKSHANDAVAISLFGKEVSAVRDTCQTVHYKQVRKSKRSLHEAIPRKGRKRPNTKAVRNKKNTTQVNGFKLWDSVLANGKKLFICSFTGTSAYLIDKNGCYISQPGKTYKQWPLSKLKRLHPNGNWLMA

SEQ ID NO: 18728 - protein, 424 aa, unidentified; identical to SEQ ID NO: 3232

SEQ ID NO: 18729 - protein, 420 aa, unidentified
MQYVYVLSKHGEPMMPCSPGKARLLLKQQKACVVRRTPFTIKLLYGSAGYKQPITLGVDAGSKHVGLSASTEKRELYREEFTPRNDVVELLSTRRQNRRSRRNRKTRYRVPRFDNRVHSKHKGWLAPSVEVKIQEHITVIKHICKILPISLVRVETAEFDTQRLKAMLAGKPLPVGTDYQLGEMYDEYNVRQYVLKRDNYTCQCCGAHTTAKKLVKLHVHHLESRKTGGNAPSNLVTLCTTCHKNLHKGRVTLDGKERGKPLRDAAFMGIMRKTLMVRLKEELPIPVQGTYGYITKMRREQNDIKKSHTNDARCISKHPLAEPCSVCYRTKAIRHHNRQTHKANFSKKGIRKRSQMPYLVEGYRLWDKVLYKEQECFVSGRRSSGSFTLKKLDGTSVSKGVTFKKLRLLEPATNYLIERM

SEQ ID NO: 18730 - protein, 518 aa, unidentified; identical to SEQ ID NO: 7282

SEQ ID NO: 18731 - protein, 442 aa, unidentified; identical to SEQ ID NO: 3791

SEQ ID NO: 18732 - protein, 518 aa, unidentified
MTPKKRKEASRMSEYIYVLGMDGDPQMPTKRKRHVEKLLQVGRARVFRQIPFTIQLTYENKPVLQPITIAEDPGRSNIGMAVVSLSGELLSAAVVQTRNKEIVKLMEKRKQHRRASRNGERKARQRLAKKCHTIIKTGFLMRKLPMYGKDKRVRCNVIKNTEAKFCNRKREDGWMTPSAEHLVRTHINLIHKMQKFLSITDVAIEINRFAFLSLEDPSISGVDFQNGPLKGYDDLNAAVEDLQDGHCLMCNSPIEHRHHIVPRSMQGSNTIGNIAGLCCKCHERVHKDARFEDRLKKKKAGLNKRYAAVSVLNQAIPFICKRLEQEFGKEHVHYCSGRDTSMVRRSLGYHKTKEEQLHEVDAWCIAVLALQHVPEKAPEFDHVHEILQFRRQDRSRIKAQTSRAYYHEGKKIAKNRKKAEGQREDSLQEWRKRQVERYGKEQTRKMISQLEVKESIRRYNRLDRLMPGAVFYYQGVRYVMRGQHSNGQYLQAVGMGDKDFPAKKCKIVVHNQGLVFVS

SEQ ID NO: 18733 - protein, 577 aa, unidentified
LYIKMTSCTCTVFPACNHAKASSSQGKHNLLFRQGRLIAKKVTYMSTVYVLNKDGKPLMPTTRGGHVRHLLKEQKARVVQSNPFTIQLLYETNDAVQPLYLGIDPGRTNIGVAVVKADGTAVFTAHLKSRNKEIPKLMQDRKRARRARRTNGRRHRRQRRAKANGTISKKCVKQTTTQNGSVSKRAKEIGIIKRHLPGCEKDVLCIGIKNKEAKYTNRERPEGWLTPTANQLLQTHVNLVKKVQKLLPISDVVLEVNKFAFMRLDNPDIQKWQYQQGPLYKKESLESAVSEMQEHHCLFCKKPIDHYHHVVPKSENGSNTIANIVGLCAEHHNLVHKDVAWQEKLAEEKTGLNKKYGALSVLNQIIPALTNKLSVLFPKHFFVTAGKSTHDYRAAHGVSKDHWLDAYCIACSVLPSNVCDSNINNHVPYELKQFRRHDRRTLHKENMSRVYTLNGKAVATNRHKAIKQTTDSLEEFRQNYPDDVYKLKVKEHHPAYRNLNRNYPGSVFLVGKQAHVMQGIASSKDGKTTKYNDTNATTITAGKCKFVAKNSGILFVQCKFRKALSDGTTKKLQYPVR

SEQ ID NO: 18734 - protein, 470 aa, unidentified; identical to SEQ ID NO: 2825

SEQ ID NO: 18735 - protein, 413 aa, unidentified; identical to SEQ ID NO: 8345

SEQ ID NO: 18736 - protein, 357 aa, unidentified
TEKAELYASEVELRQDVSDLLSARRTLRQSRRNRKTRYRAPRFDNRIRTKRKGWLAPSVENRINAHLSRIGAILRLLPVTKITVETASFDTQLLKNPDISGKEYQEGEQLGFWNVREYVLFRDGHACQHCHGRSKDPVLNVHHLESRRTGGDSPGNLLTLCETCHKALHRREIKLKTKRGQSFRAEAFMGIMRWEVLNRLKASHPELEVNNTYGYWTKHARIANGIAKSHCADAFCIAGNLGAERLGEFFFQKQTRRNNRQIHKLSILKGGIRKRNQAPFEVKGFRLFDKVACQGEEGFIFGRRSTGYFDVRKLDGTCISAGISYKKLHLLEKRRTYLTEIRKEAFPPLPEGRSLRA

SEQ ID NO: 18737 - protein, 418 aa, unidentified; identical to SEQ ID NO: 8891

SEQ ID NO: 18738 - protein, 476 aa, unidentified
LYIKMTSCTCTVFPACNHAKASSSQGKHNLLFRQERLIVKEVAYMSTIYVLNKDGKPLMPTTRGGHVRHLLKEQKARVVRAKPFTIQLLYETNDVVQPLYLGIDPGRTNIGVAVVKANGTAVFTAHLETRNKEIPKLMQDRKKARRARRTNGRRCRRQRRAKANGTISKKCVKQDTAQSKNPSKRAKEIGVIKRRLPGYKKDVLCIGIKNKEAKYTNRARPEGWLTPTANQLLQTHINLVKKIQKFLPISDVVLEVNKFAFMRLDNPDIQKWQYQQGPLYQKGSLENAVSEMQEHHCLFCDKPIDHYHHVVPQSENGSNTIANIVGLCSEHHNLVHKDAAWQKKLAEEKVGLNKKYGALSVLNQIIPALTNKLSVLFPKHFFVTAGKSTHDYRATHGVSKDHWLDAYCIACSVLPSDVCDSNINNHMPYELKQFRRHARRALNNENMNRVYMLNDKAVAINRHKATEQEAASLEEF

SEQ ID NO: 18739 - protein, 490 aa, unidentified; identical to SEQ ID NO: 6170

SEQ ID NO: 18740 - protein, 450 aa, unidentified; identical to SEQ ID NO: 17926

SEQ ID NO: 18741 - protein, 415 aa, unidentified; identical to SEQ ID NO: 6843

SEQ ID NO: 18742 - protein, 450 aa, Clostridium sp.; identical to SEQ ID NO: 10471

SEQ ID NO: 18743 - protein, 419 aa, unidentified; identical to SEQ ID NO: 5271

SEQ ID NO: 18744 - protein, 442 aa, Lactobacillus sp.; identical to SEQ ID NO: 5193

SEQ ID NO: 18745 - protein, 279 aa, unidentified
VVVETAEFDLQLLKAIADGKPVPQGEDYQKGEMYGHYNVRQYVLWRDNYTCQCCGTHPSKKKEVRLHVHHLESRKVGGDAPDNQVTLCESCHEKLHKGLIAEKDFKKRKRKSTRDATFMGIMRKTLMQRLCSELPIPVVKTRGYITKATREKLLVLPKSHTNDALAIAQGKQGFNVGYLPGIVQINKIYTIRPVRHHNRQLHKATILKGGIRKSNQTEKYVFGYRLFDKVQFNGQDCFIWGRRTTGIFTIKTINGKMIKDGISFKKLKLVEKSTSYLIA

SEQ ID NO: 18746 - protein, 356 aa, unidentified
LSKVKTMRVFVFNMRGRPLMPCSQRKARLLLRENKAKIYKYHPFTIQLTYTTGETKQDCHIGIDTGSKYIGAAVRSEDKVFWKGEIELRQDIRSNLDTKRIYRRSRRNRKTRYRKPRFLNRKRRDEWLPPSLQSRINHTFHWIDTLSSLVPNPILHIEVGKFDVAKMINPEIHGVDYQHGQTYGFFDERYFVFARDNYTCQCCGKSKNKILNTHHIIYRSNGGTNRVDNLITVCTDCHTSQNHRKGGIFYQWQEQHKKVKQYKEPPFMNTLRKRIFVAYPDAEITYGSETTPKRKAMKLDKTHYNDAIVISGINEIKENPEEWLLIKQFRKKKRSLHEATARKGRKKPNRNQTRNS

SEQ ID NO: 18747 - protein, 421 aa, unidentified
MRGRPLMPCSPAKARHLLKAGKAVVRRRTPFTIQLRIATGETKQSVTLGVDAGAKHVGLSAATEKEEVFASEVELRQDITGLLAARLSLRRERRQRKTRYRAPRFLNRVRSKHKGWLAPSVENRIQAHLSRIDAICGLLPVTKIVIETASFDIQKIKHPDVEGTDYQQGDQLGFWNVREYVLFRDGHVCQHCHGHAKDKILNVHHLESRQTGGDAPNNLITLCETCHKACHAGKIKLKVKRGQSFREEAFIGIMRWTLLDRVRKAHPGLPVENTYGYLTKNTRITLGLPKAHCVDAYCIAGNLKAVRRGVCLHQRQVRKHNRQIHKCTVLSKTLKDGTKIGYRKLNQTPHLVKNFRLFDKVRCLGQTGFIFGRRSSGYFDVRRLDGVKISSCISYRKLTLLEKRSTYLTELRKEDGASSPV

SEQ ID NO: 18748 - protein, 423 aa, unidentified
MRVFVFNMRGEPLMPCTQRKARLLLKTGKAKIYKYNPFAIQLKYVTGENKQECHVGIDTGSKYIGLAVTSENKVLFKGEVELRQDVKSKIDTKRIYRRSRRNRKTRYRRCRFLNRKRFGKWLPPSLQNRINHTFKWIDKLCSFIPESILHIEVGKFDIAKMINPEVHSVDYSQGQTYGYQGERYFIFARDNYTCQVCGERNKPLQTHHIIYISNGGTNRVDNQITVCKECHTSTNHKNGGIFYKWQKEHKKVKQYKAPPFMNVLRQQIFNQYPQALITYGFETTIKRKNIGLEKTHYNDAIVISGVSTISENLHEWLLIRQFRKKKRSLHEGVPRKGRKEPNRIQKRNSKNTPYYRGFYLNDKVSVFGKSGYITGFTNSGAYVKGVDGEYIVLPNKSYKRVNIASLKFICHNNNWQYITKNAV

SEQ ID NO: 18749 - protein, 433 aa, unidentified
LAKGNNSIKGGQNLRVFVKNLKGEALMPCSPCKARKLLKTKQAKIIDYKPFTIQLLIATGETVQECNVGIDTGSKHIGVAITLENKVLVKGEIELRQDVKSNLDTRRIYRRSRRNRKTRYRKARFDNRKRNKEWLPPSIQSKLDIEFRMIDKFIDLVPNPSLFIEVGKFDAAKMINSDIEGIEYQQGQTYGYYDTRYYVFARDNYTCQVCHKGGILQTHHIVYKSNGGTDRADNLITVCDKCHSYENHQKGGILYEWQEKHKKVKQYKEPPFMNIVRKRVFNKYPKAYITYGSITTPKRKEMGLDKTHYNDAIVISGIEQIIQDESEYFKFQQFRKKKRSLHEANARKGRKTPNTDAKRNSKNTKEAYGFYLNDKVSVNDKIGYIVGFCKDGCYVKNTNGDYIVLEGKTYKQISPKQINFISHNNNWRYEITT

SEQ ID NO: 18750 - protein, 413 aa, unidentified; identical to SEQ ID NO: 3220

SEQ ID NO: 18751 - protein, 419 aa, unidentified; identical to SEQ ID NO: 3670

SEQ ID NO: 18752 - protein, 423 aa, Moorena sp.; identical to SEQ ID NO: 5218

SEQ ID NO: 18753 - protein, 372 aa, Ferroplasma sp.; identical to SEQ ID NO: 4479

SEQ ID NO: 18754 - protein, 424 aa, Enterococcus sp.; identical to SEQ ID NO: 12083

SEQ ID NO: 18755 - protein, 424 aa, Anabaena sp.
MSNYALVLDTNKQPLSPCHPSVARKLLDSEKAAVFRRYPFTIILNKSCSDIVNQAIELKIDPGSKTTGIALIQGKKIIFGGELSHRGNAIKASLESRRSLRRGRRNRHTRYRQARFLNRTRTKNWLAPSLQHRVETTLTWVNKLIKFAPITSISQELVRFDLQQIDNPEISGIEYQQGTLSGYEVREYLLEKWQRKCAYCGIKNVPLQVEHIHPKARGGTNRISNLCLACEKCNIKKGTQDIKDFLAKKPDLLKCILAQAKRPLKDAAAVNSTRWALFSRLKETGLPLSTGSGGQTKFNRTRLNFPKTHWLDAACVGQIGELAVLTNKPLLIKATGHGTRQMCRTDKFGFPSRYVPRIKFVKGFQTGDIVKAIVTTGKKIGKYIGRVAVRATGSFNISASKLVQGISYKYCKIIHRKDGYDYAF

SEQ ID NO: 18756 - protein, 515 aa, unidentified; identical to SEQ ID NO: 5111

SEQ ID NO: 18757 - protein, 442 aa, unidentified; identical to SEQ ID NO: 2903

SEQ ID NO: 18758 - protein, 415 aa, unidentified; identical to SEQ ID NO: 3582

SEQ ID NO: 18759 - protein, 492 aa, unidentified; identical to SEQ ID NO: 4486

SEQ ID NO: 18760 - protein, 374 aa, Oscillatoria sp.; identical to SEQ ID NO: 17081
  VARIANT 291: note = X can be any naturally occurring amino acid

SEQ ID NO: 18761 - protein, 417 aa, unidentified
MQYVYVLNKHGEPLMPCSPGKARLLLKQQKACVVKRTPFTIKLLHGSAGYKQPVTLGVDAGSKHVGLSASTETHELYCEEFTPRNDVVELLSTRRQNRRSRRNRKTRYRAPRFNNRVHSKHKGWLAPSVEVKIQEHITVIKRICRILPVTLVRVETAEFDTQRLKAMLAGKPLPVGTDYQLGEMYDEYNVRQYVLKRDNYTCQCCGAHTTAKKAVKLHVHHLESRKVGGNAPSNLITLCIACHNNLHKGKVTLDGKKRGKTLRDAAFMGIMRNTLLIRLRNELNIPVQNTYGYITKLLREQNDIKKSHINDARCISKHPLAVPCSVCYCTKAIRHHNRQIYKAKILKGGVRKANQATYIVKGFRLWDKVLYNGQECFISGRRSSGYFALKKLDGTTITNSISFKKIAAIRACNKLLN

SEQ ID NO: 18762 - protein, 421 aa, unidentified
MVYVLDITGQPLMPTDRHGKVKHLLKDGKAKVVKRCPFTIQLLYTTTTYTQEITLGVDAGSKVIGLSASTPRKELYSSEVTLRNDIVKLLSLRREYRRSRRNRTTRYRAARFNNRVHSKNKGWLAPSIENKINTHIKVVADIHKILPISKIVVETASFDIQKIKNPNISGEEYQQGEQLDFWNVRQYVLFRDNYTCQCCKGKSKDNRLAVHHIESRQTGGNAPNNLITLCITCHKKYHKGKIKLPNTIKRDKIFKDAVFMGIMRWAFYERLKNIYPNIRMTYGYITKNTRIQHNLSKTHYTDALCISGNPLAKPLEVLYIQKAIRTRNRQIHKATISKGGIRKLNQAPKYVFGFQLYDKVLYKGKECFIFGRRSSGSFDIRTLDGTKISPGVSHKKLKLLEKRKTILTERVIKNQEGGKRG

SEQ ID NO: 18763 - protein, 423 aa, Arthrospira sp.; identical to SEQ ID NO: 6821

SEQ ID NO: 18764 - protein, 384 aa, unidentified
MSARTPDIRGLMDERSMYRNSRRHHRRENVLKKGWTAQHRPPRYESRGKRDPVTLKHGLETHINLYERLARLAPLPSYQVTRGFESASFDLRALAHGKPRTGSSYQVSPIGKGPGEKMHRFVFRRDGGCVICGSKTHLHNHHLRKRSKQGSDRASNQVTLCKDCHADVHAGLIALPITDGAQWRDASTVNAVCGKLRIQATEFGIVPIPVEQSVAARRRLGLEKTHALDAVSVAAAITGAGTVDQMDTLDMDMTQYRRHRRAHIHAQRDRLYYLPGEKKPVAHNRRKRCDQGDMDSLAEFRQAHPEDIGRLKVKKAVRLYTPNRAKAPAVGGDVWEIGGQRVVVRGVHSKTNLYMPDLKPVTGKVYAAPKDGVRLLWNTGMVVV

SEQ ID NO: 18765 - protein, 447 aa, unidentified; identical to SEQ ID NO: 17795

SEQ ID NO: 18766 - protein, 428 aa, unidentified; identical to SEQ ID NO: 5055

SEQ ID NO: 18767 - protein, 396 aa, unidentified
LLKQKKACVVKRTSFTIKLLYGSTGYKQPITLGVDAGSKHIGISATTEKHELYREEATPRNDVVDLLSARRAFRRSRRNRKTRYRAPRFNNRVHSKHEGWLAPSVEVKIREHITLIKRVCRILPVTLVRVETAEFDTQRLKAMLEGKPLPVGTDYQLGEMYDEYNVRQYVLKRDNYTCQCCGAHSTKTKDVKLHVHHIETRRTGGNAPNNLITLCTDCHKALHAGKVTLDGKKRGKPLKDAAFMGVMRKTLMERLHKKLKIPVQGTYGYITKYLREKNGIPKSHTNDARCISKNPLAIPCDTCYYTKAVRHHNRQLHKATILKGGIRKANQAPYIVKGYRLWDKVSCNGTECFITGRRTSGYFALKKLDGTVISNSISYKKLRLLEVATNYITERR

SEQ ID NO: 18768 - protein, 442 aa, unidentified; identical to SEQ ID NO: 2903

SEQ ID NO: 18769 - protein, 409 aa, unidentified
RRINGRRCRRQRRAKANGTISKKCVKQTTAQNGSVSKRAKDIGVIKRRLPGCEKDVLCIGIKNKETKFTNRTRPEGWLTPTANQLLQTHINLVKKIQKFLPISDVVLEVNKFAFMRLDNPNIQKWQYQQGPLYKKESLESAVSEIQEHHCLFCKKPIDHYHHVVPQHKNGSNTIGNIVGLCAKHHDLVHKDSAWEKKLAQKGTGLYKKYGALGVLNQIIPTLTNELSSLFPKHSFVTNGKSTYDYRAAHGVSKDHWLDAYCIACSVLPSNVCDSNINNHMPYELKQFRRHDRRVLNNENMNRVYTLNNKAVAINRHKAKDQKTVSLEEFRKEHPDDVCKLKVKEHHPTYRNMNRNFPGSVFLVGKQIHVMQGIASSKDGKATKYNDTSATAIAAGKCKFVAKNTGILFV

SEQ ID NO: 18770 - protein, 414 aa, unidentified; identical to SEQ ID NO: 7136

SEQ ID NO: 18771 - protein, 420 aa, unidentified
MQYVYVLSKHGEPMMPCSPGKARLLLKQQKACVVRRTPFTIKLLYGSAGYKQPITLGVDAGSKHVGLSASTEKRELYREEFTPRNDVVELLSTRRQNRRSRRNRKTRYRAPRFDNRVHSKHKGWLAPSVEVKIQEHITIIKRICKILPISLVRVETAEFDTQRLKAMLAGKPLPVGTDYQLGEMYDEYNVRQYVLKRDNYTCQCCGAHTTAKKLVKLHVHHLESRKTGGNAPSNLVTLCTTCHKNLHKGKVTLDGKERGKPLRDAAFMGIMRKTLMARLKEELPIPVQGTYGYITKMRREQNDIKKGHTNDARCISKHPLAEPCSVCYRTKAIRHHNRQTHKANFSKGGIRKRSQMPYVVEGYRLWDKVLYKGQECFVSGRRASGSFTLKKLDGARISKGVTFKKLRLLEPATNYLIERM

SEQ ID NO: 18772 - protein, 415 aa, unidentified
RKVAEMPTFKKYAFVLDAEGKRLDPTIEQNAWRLVRQHKARLVSKFPMVIQLNKVVDNPNNDEIRCGIDDGANHVGLALAQKCQTRNKVLFKGTIEQRKDVKHLLTVRRGYRRYHRYHKQYRPARFLNRASSRRSGRLMPSIIQRKQAILRVIDRLCQWINIDGYWLEDVKIDIRALTDGYKPYRWQYQKTNRLDNNLRLAAIHRDGCKCVECGKTKTRFEVHHITPREVGGADTISNLITLCPKCHAKTFGRESQFADRYYALIGSTGHVEGLADAQRVMQGKHWFREQLKQRGSLVLTTGGNTANKREDWDIAKTHSNDAVCITDLKPENIDIEEWTIKPMRRKNKAGVDEVCGFHHRDYVTYTYRNGETHTGYVTAMYPELHALNFQSPTKHCKKANALKCKLVWRYSKIYW

SEQ ID NO: 18773 - protein, 431 aa, unidentified
MPNKVYVINKHGRPLMPCSPAKARHLLDAGKAKVKKRTPFTIQLVYGSSGYIQEVILGVDAGSKTIGMSASTTKEELLSAEVKPRNDVVDLLSTRREFRRARRNRKTRYRKPRFDNRVRSKHKGWLAPSVEVKIQEHITSIKRACRILPVSKVVVETAEFDLQLLKAIADGKPVPQGEDYQKGEMYGHYNVRQYVLWRDNYTCQCCGAHATKKKEVRLHVHHLESRKTGGDAPGNLVTLCDSCHEKLHKGLIAEKDFKKRKRRSTRDATFMGIMRKTLMQRLCSELPIPVVETRGYITKATREKLLVLPKSHTNDALAIAQGKQGFNVGYLPGIIQTDKIYTIRPVRHHNRQLHKAAILKGGIRKSNQAGKYVFGYRLFDKVQFNGQDCFIWKRRTSGYFAVKTIDGKVIHNSASFKKLNLVERASNYLIA

SEQ ID NO: 18774 - protein, 425 aa, unidentified
MVYVLNKNGQSLMPTNRHGKVKHLLKDGKAKVVKRCPFTIKLTYETTNYTQDLTLGVDTGSGTIGTAVSKDSGDIIYMSEIVVRNDITDKMSQRAKYRRNRRNRKTRYRQARWLNRRNSIRKDRFSPTMQSKLHSHVKEIEYIKSILPITTMVFETGQFDMHLMKNPMLANPKVKHWGYQKGTNYGFENTKAMVLNRDNYTCQYYKGKHKDSKLEVHHIIFRSQGGSDEDSNLITLCHTCHKNLHDGKIAPNFKGKAKGTLKYATQMNSIRKQLFRLYPEVIETFGYVTKANRLAIGIEKEHYYDACTIATQGKPFIVKTNFYKKKCVSDGDFQKTKGIRSEQPIVTDKIYGFRKFDKVKYFGKEYFIKGRMSTGYAILMDIEGNKVDFLTMPKGFKTPKMINLKRLEARSSWMVTTVEVTPNIV

SEQ ID NO: 18775 - protein, 418 aa, unidentified
MLVYVLKQNGQPFMPTERFGKVRRLLKEGKARVVRREPFIIKLLYEPETNVVQECYCGVDTGSRHIGVAVVGNDKVLYQSQTELRNDIKKKMDHRRAFRQNRRFRKTRYRKPRFLNRRNSIKKDRLPPSVRHKVQSHIDEIEFCKKILPISDLILEVSQFDTALMKNPSLMNEKVKHWGYQKGFNYGYSSRRGAILHRDNYTCQCCGKKNCRLEVHHIRFKSDGGTDDEENLITLCEDCHNGVHAGTVVLNKSPKKSKGLKHATHMSIIRSWLLKKYQDAIETFGFVTAENRNHLKLEKDHYIDACVIASGGLDFKELDVIYKKRRVSVQDRILTGGIRGEKRLPTEKLFGFKKFDKVKYLGETYFIKGRRNSGFFVLMDIDNNSIDFRDRGGKQNPSYKSIKRINMRRSVLCIRERL

SEQ ID NO: 18776 - protein, 472 aa, unidentified; identical to SEQ ID NO: 4432

SEQ ID NO: 18777 - protein, 418 aa, unidentified; identical to SEQ ID NO: 11413

SEQ ID NO: 18778 - protein, 482 aa, unidentified
LVWNVQAPWDVYPSPTLCGLCLKVLRGRNGDADKKPIPTLTKDENRPSGRTTGLRAEQAEPAGIRKGDTLKVFVLNMRGKPLMPCSPAKARHMLKAGKAFVVRRTPFTIKLTIATGETKQDVTLGVDAGARHVGISATTEKEEVFASEVALRQDITGLLADRLAFRRARRNRKTRYRAPRFNNRVRSKHKGWLAPSVENRIQAHMSRIDAVCRLLPVTKIVIETASFDVQKIKNPTIEGTDYQQGDQLGFWNVREYVLFRDGHVCQHCHGRSRDKILNVHHLESRKTGGDAPNNLITLCETCHKAYHAGKIKLKVKRGQSFRAEAFMGIMRWTLLDRVRKTHPKLPVENTYGYLTKHKRIALGLPKTHCADAFCIAGNLKALRRGDFLFQQQTRKHNRQIHRCSILKGGVRKLNQAPFLVKGFRLFDKVRIGGQIGFVFGRRVRGTFNIRRLDKTVIGTDINCKKLSLLETRKTFLTELRKE

SEQ ID NO: 18779 - protein, 416 aa, unidentified
MTNCENYAFVLDAEGKQLSPTKEKKAWYLIRKKRAILVSKYPMVIQLNKIVSNDNICKDEIRCGIDDGGLHVGIALVQKCQTKNKTLFKGTIEQRNDVKHLMKVRWDYRRYRRYHKRYRPKRINNRSSSKRTDRIAPSILQKRQATLRVITQLNKWINITSYWLEDVAIDVRVLTDGFSSYGWQYQKSNRLDENIRKAVILRDGCRCMECGQSNCRLEVHHIKPRRLNGSNTLGNLITLCESCHQKTEGKEEQYMQHYFNILESSDNKNLNYASYVMIGKTWLRKQLSQLGVLNLTTGGNTANKRIDWNIEKSHSNDAVCITDLQPDSCNVKDWIIKPMRRQSKAKTDNVLGIKHRDLVSYVYKNGELHIGYVTALYPELNALNFQSPTKHCKKVNVRKCRVLWKYNKIYWLDSVS

SEQ ID NO: 18780 - protein, 480 aa, Planomonospora sp.; identical to SEQ ID NO: 9790

SEQ ID NO: 18781 - protein, 431 aa, unidentified; identical to SEQ ID NO: 4306

SEQ ID NO: 18782 - protein, 515 aa, unidentified; identical to SEQ ID NO: 15013

SEQ ID NO: 18783 - protein, 388 aa, unidentified
MFSVFVLDANRKPLTPCKPGVARSLLKAGKASVFRRYPFTLILKKEVDANPEPIEIKLDPGSQVTGIALKQGDRIIFGAELQHRSQQIKDALLSRRQLRRSRRNRKTRYRQARFLNRTRPNGWLAPSLQHRIDTTMTWVNRFRRLAPIAHISQELVRFDLQLMQNPEISGIEYQQGELPGYEVREYLLEKWNRKCAYCGAKNVALEVEHIHPKSKGGTDRVSNLTLACHSCNQSKGNQDIRDFLSGKPDLLSRILRQAKSPLKDAAAVNSTRWALLTALKQTGLPVATGTGGQTKFNRTRWELPKAHWLDAACVGKIESLEILTSKPLLIAAKGHGTRQMCGTDKYGFPTRHRSRVQIHKGFQTGDIVTATVMTGKKIGSYVGLAEKK

SEQ ID NO: 18784 - protein, 393 aa, unidentified; identical to SEQ ID NO: 5287

SEQ ID NO: 18785 - protein, 414 aa, unidentified; identical to SEQ ID NO: 4779

SEQ ID NO: 18786 - protein, 415 aa, Bacillus sp.; identical to SEQ ID NO: 2431

SEQ ID NO: 18787 - protein, 408 aa, unidentified; identical to SEQ ID NO: 8232

SEQ ID NO: 18788 - protein, 406 aa, unidentified; identical to SEQ ID NO: 6445

SEQ ID NO: 18789 - protein, 406 aa, unidentified; identical to SEQ ID NO: 10802

SEQ ID NO: 18790 - protein, 406 aa, unidentified; identical to SEQ ID NO: 6028

SEQ ID NO: 18791 - protein, 470 aa, unidentified; identical to SEQ ID NO: 5326

SEQ ID NO: 18792 - protein, 408 aa, unidentified; identical to SEQ ID NO: 5302

SEQ ID NO: 18793 - protein, 452 aa, Lactobacillus sp.; identical to SEQ ID NO: 3322

SEQ ID NO: 18794 - protein, 416 aa, unidentified
MVYVLSQNGQPLMPTGNHAKVRVLLNQRKAKVIKRCPFTIQLQYESTTHTQKINLGIDAGSKTIGVSATTESKVLYESEVVLRNDIVELLSGRRALRRSRRNRKTRYRKPRLDNRRRPDGWLAPSIRQKIKTHVTVVENVMKILPVTKIIVETASFDIQKIKNPKIEGAEYQYGEQLDFWNVREYVLFRDGHTCQCCKGKSKDNILNVHHIESRKTGGNAPNNLITLCETCHKAYHKGVITLPKEIHRGMRFRDAAFMGIMRWAFYDRLKELYTPFGVEVINTYGYITKNTRIEYGLPKEHYVDARCISGNPAAKPLDHYYFQKKVRCHNRQIHKNTILKGGYRKRNQVEYEVKGFRLYDQVLWKGQKCFIFGRRSTGRMDLRLLDGTHVNASVGYKNLKLLSMRKNYLIEQRKAG

SEQ ID NO: 18795 - protein, 457 aa, unidentified
VWLYQAVYNLGEGFLPSSEERTAFYWLLICRKEHGIMQYVYVLNKHGEPLMPCSPGKARLLLKQQKACVVKRTPFTIKLLYGSAGYKQPITLGVDAGSKHVGLSASTEKRELYREEFTPRNDVVDLLSTRRQNRRSRRNRKTRYRAPRFDNRVHSKHKGWLAPSVEVKIQEHITVIKRICRILPITLVRVETAEFDTQRLKAMLKGKPLPVGTDYQLGEMYDEYNVRQYVLKRDNYTCQCCGAHPTEKKPVRLHVHHLESRHVGGNAPNNLITLCVACHKALHEGKITLDKGKKRGKPLRDAAFMGIMRNTLLARLKDELNIPVKQTYGYITKLLREKNKIPKSHVNDARCIAKAPNAKPCDTMLYTRALRHHNRQIHKAKILNGGIRKKNQAPYLVKGFRLWDKVRYNGEECFITGRRSSGYFALKKYDGTVISNSASYKKLMLLEAATNYITERS

SEQ ID NO: 18796 - protein, 465 aa, unidentified
MSTCVCVLSNNGERLMPTIRLGKVRHLLKDGKAKIIKHHPFIIQLLYDSETNIQPIEICEDVGYNYIGISVKSQSHEYVSAQYDTLQDEKSCHDACRRMRRTRRNRLRYRQKRFDNRKRDKGWLAPSLKHKKELNVNVIKMYCEVVPITHATVEVGSFDTMLVKAIEEGKATPEGADYQKGPRYNLATLREAVFYRDNYTCQVCGREASEGAILHVHHMFYWKGRHDNSLSELITVCEKCHTPANHQKGGKLYGFGEDIKFANLSGAAFMNTVRWQIVNELYAAFGKPFVTFTYGAMTKEKRIALHLEKSHNNDAYAMGEFHPNCRCTFEHYEKVRRNNRILEKFYDSRYIDIRTGEIATGKELFNGRINRSHKKDSENLHKYRGKRIRKGYRALRRKKVALNPGDLVSLNGEILTVHGTHTKKNGSVNVEFKTPSKSGKKSTSLKKLKIIKTISPMRSAWDKVS

SEQ ID NO: 18797 - protein, 413 aa, unidentified; identical to SEQ ID NO: 11236

SEQ ID NO: 18798 - protein, 312 aa, Desulfurobacterium sp.
VKLRQDVSRKVKERAMYRRNRRSRLRYRPARFLNRRRTKDWLPPSIRYRKEVVLRVLNDLKKFLNITKVIIEQVKFDISSIVAGRKLTGTEYQQKRYEGKSFREKVLKRDSYTCQICESRENLEAHHIIPRSRGGTNCIENGITLCKECHRAVHEGKIRITANVLSLKAPSVVQQGKLWLYRKLKGQFGKVEITFGYLTKKKREELGLPKDHYADACAMLNCNRIVSPVYLVIPRRRRPEINHPTKKHDEYRGFRHFDLVVAYHRTKGKLIGCVRSLKKSGLAIRTKFSDNFVVGYTKSKLLWRPGGLVYVL

SEQ ID NO: 18799 - protein, 442 aa, unidentified
MVTVQQSTHHLPFGRVFIRRNLFMVYVISQDGKPLMPCSDPIARLLLKQGKAKVKKRDPFTIKLTYETTNYTQGLTLGVDTGSGTIGTAVSKDNGDIVYMSEVVVRNDITDKMTQRAKYRRNRRNRKTRYRKARWLNRASSIKKDRFSPTMQSKLHSHVREIEYIQSILPVTEMVFETGQFDMQLMKNPSLANPKVRPWGYQKGANYGFENTKAMVLNRDNYTCQCCKGKHKDSKLEVHHIVFRSQGGSDEESNLLTLCHTCHKDLHSGKINPKLSGKVKGNLKYATQMNSIRKQLFRFYPNAIETFGYVTKANRLHLGVDKEHYYDACTIATQGNAFNVKSNLYKKKCVSDGDFQKTKGIRSEQPIVTDKICGFRKFDKVRYFGNDYFIKGRMSTGYAILMDIDGNKIDFSTMPRGYKTPKLSNCKRITARSTVMTQVKVV

SEQ ID NO: 18800 - protein, 450 aa, unidentified
MSTVYVLNKDGKPLMPTTRGGHVRHLLKEQKARVVRTKPFTIQLLYETNDVVQPLYLGIDPGRTNIGVAVVKTDGTAVFTAHLETRNKEIPKLMKKRKDSRRARRTNGRRCRRQRRAKANGTISKKCVKQTTAQNGSVSKRAKKIGVIKRHLPGCEKKVLCIGIKNKEAKFSNRTRPEGWLTPTANQLLQTHINLVKKIQKFLPISDVVLEINKFAFMRLDNPNVQKWQYQQGPLYQKASLEEAVSEMQEHHCLFCKNTIDHYHHVVPQHKNGSNTIGDIVGLCAKHHDLVHKDTTWQKKLAKKKTGLNKKYGALSVLNQIIPALSKELSSLFPKHFFATNGKSTYDYRAAHGVSKDHWLDAYCIACSVLPNDVCDSDINNRVPYELKQFRRHDRRALHKENMSRVYTLNGKSVATNRHKATEQTTDSLEEFRQCQPDDVCKLKVKESCK

SEQ ID NO: 18801 - protein, 431 aa, Methylocaldum sp.; identical to SEQ ID NO: 10979

SEQ ID NO: 18802 - protein, 337 aa, Oscillatoria sp.
  VARIANT 28..29: note = X can be any naturally occurring amino acid
  VARIANT 32: note = X can be any naturally occurring amino acid
  VARIANT 46: note = X can be any naturally occurring amino acid
  VARIANT 48..49: note = X can be any naturally occurring amino acid
MSNHVFVLDTNRKPLTPCQPGVARSLLXXGKXSVFRRYPFTIILNXEXXANPEPLELKLDPGSKVSGMALKQGNQIIFAAELQHRGEPIKKALLSRRQLRRSRRNRKTRYRPARFLNRTRPEGWLAPSLQHRVDTLMTWVHRFRRLAPVGRITQELVRFDLQLMENPEISGVEYQQGELQGYEIREYLLFKWGRTCAYCGAKNVPLEVEHIQPRSKGGSDRVSNLTLACHSCNQAKGNGDIRDFLSGQPDLLGRILKQAKSPIKDAAAVNSTRWALFKALKATGLRVTTGTGGQTKFNRLRLNLPKAHWLDAACVGPVESLEVMTSKPLLIRAKGHG

SEQ ID NO: 18803 - protein, 424 aa, unidentified; identical to SEQ ID NO: 3434

SEQ ID NO: 18804 - protein, 460 aa, unidentified
GVSCMNTCVCVLSNSGERLMPTFRLGKVRRLLKDGKAKIVKHHPFSIQLLYDSKTNTQPIETCEDVGYNYIGISVKSESHEYVSAQYDTLQDEKEHHDDCRKYRRTRRNRLRYRKSRFDNRKRDKGWLAPSLEHKKQLNISLIERYVSVIPITHVTVEVGSFDTMLVKAIQEGKVIPEGADYQKGPRYNLATLREAVFYRDNYVCKVCGRKATEGAILHMHHMFYWKGRHGYQLDELVTVCEKCHTPANHQKGGKLYGFGKDKKFANLSGAAFMNAVRWQIVNALYATYGKEFVTITYGAMTKEKRIALQLEKTHNNDAYAMGDYHPARRCKFRHYQKRRRNNRVLEKFYDATYVDTRTGNKAKGKELFNGRISRNHKKDCENLHKYRSKKVSKGRRSIRRQHYAIQPYDTVRLEGKTYITSGCHNKGTRLLIPVNGKSKSVAISKVQVVCHAGAWIQII

SEQ ID NO: 18805 - protein, 413 aa, unidentified; identical to SEQ ID NO: 3924

SEQ ID NO: 18806 - protein, 416 aa, unidentified
MVYVLSQHGQPLMPTENHAKVRALLKHGKAKVIQRCPFTIQLLYESTTHTQKINLGIDAGSKTIGVSATTDSKVLYESEVVLRNDIVELLSGRRALRNSRRSRKTRYRKPRFDNRKKPDGWLAPSIRQKIETHVTVVGNVMKILPVTKIIVETASFDIQKIKNPEIEGEGYQHGEQLDFWNVREYVLFRDGHTCQCCKGKSKDNILNVHHIESRKTGGNAPNNLITLCETCHKAYHKGIITLPKEIHRGMRFRDAAFMGIMRWAFYDRLKELYNPLDAEVINTYGYITKNTRIEHGLPKEHYVDARCISDNPAAKPLDHYYFQKKVRCHNRQIHKNTILKGGIRKRNQASYEVKGFRLYDQVLWKGQKCFIFGRRSTGRMDLRLLDGTHINASVGHKNLKLLSMRKNYLIEQRKAG

SEQ ID NO: 18807 - protein, 419 aa, Geobacillus sp.; identical to SEQ ID NO: 3993

SEQ ID NO: 18808 - protein, 472 aa, unidentified
FRQVPFTIQLTYKNQPVLQPVTIAEDPGRSNIGMAVVSLSGELLSAAVVQTRNKEIVKLMEKRKQHRRASRNGERKARQRLAKKCHTMIKTGFLMRKLPMYGKDKRVRCNVIKNTEAKFCNRKREDGWLTPSAEHLVRTHINLIHKMQKFLPISDVAIEINRFAFLSLEDPSISGVDFQNGPLKGYDDLNAAVEDLQDGHCLMCNSPIEHRHHIVPRSMQGSNTIGNIAGLCCKCHERVHKDSAFEDSLKKKKAGLNKRYAAVSALNQAIPFICKRLEQEFGKEHVHYCSGRDSSMVRRSLGYHKTKEEQLHEVDAWCIAVLSLQHVPEKAPEFDHVHEILQFRRQDRSRIKAQTSRAYYHERKKIAKNRKKAEGQREDSLQEWRKRQVERYGEEQTRKMISQLKVKKSIRRYNRLDRLMPGAVFYYQGVRYVMRGQHCEGTYLQAVGMGSKDFPAKKCKIVAQNEGLVFVS

SEQ ID NO: 18809 - protein, 422 aa, unidentified
MLVYILKQNGQPFMPTERFGKVRRLLKEKKAKVVRREPFTIKLLYEPETDVVQECYCGVDTGSKHIGVAVVGNDRVLYQSQTELRTDIKKKMDRRRAFRRNRRIRKTRYRKSRFLNRRNSIKKDRLPPSVKHKVQAHIDEIEFCKKILPVSDLILEVSQFDTALMENPGLINEKVRRWGYQKGFNYGYSSRREAILHRDNYTCQCCGKKNCRLEVHHIKFRRDGGTDNEENLITLCKECHDGVHVGTVVLNKKPKKSKNLKYATHMSIIRSWLLREYPDAIETFGFVTAENRNHLNLPKDHYIDACVIASGGLEFKGLDVIHKKRRVSVQDRVLTDGIRDEKKLPTGKVHGFKRYDKVKYLDEICFVKGRRTSGGFVLMDIDNNSIDFRDKGGTLNPSYKYLKRINTRKSVLCIHRRIEREE

SEQ ID NO: 18810 - protein, 480 aa, unidentified; identical to SEQ ID NO: 12495

SEQ ID NO: 18811 - protein, 431 aa, unidentified
MPNKVYIINKHGRPLMPCSPAKARHLLDEGKAKVKKRTPFTIQLVYGSSGYTQEVILGVDAGSKTIGMSASTTKEELLSAEVKPRNDVVDLLSTRREFRRARRNRKTRYRKPRFDNRVRSKHKGWLAPSVEVKIQEHITSIKRVCRILPVSKVVIETAEFDLQLLKAIEEGKPVPQGEDYQQGEMYGHYNVRQYVLWRDGYTCQCCGAHATKKKEVRLHVHHLESRKVGGDAPDNQVTLCESCHEKLHKGLIAEKDFKKRKRRSTRDATFMGIMRKTLMQRLCSELPIPVIETRGYITKATREKLLVLPKSHTNDALAIAQGKQGFNVGYLPEIAQIDKIYTIRPVRHHNRQLYKATILKGGIRKSNQTEKYVFGYRLFDKVQFNGQDCFIWGRRTTGIFTIKTINGKMIKDGISFKKLKLAEKSTSYLIA

SEQ ID NO: 18812 - protein, 406 aa, unidentified
MVYVQDIDGRPLMPTTRHGKVRRLLKLKKATVVNLCPFTIRLLYDTTGYKQEITLGVDTGTKHVGLSATTKSKELYASEVILRSDVVDLLSTRRELRKIRRYRLRYRKPRFMNRIKSKKRGWIVPSIRQKIDSHIRIIGFVYSILPVSKLIIEVAQFDTQKIKNPEISGKEYQEGEQLGFWNVREYVLARDEHKCQHCKGKSKDPVLNVHHIESRKTGGDSPSNLITLCKTCHKEFHKGNIKLKVNRGESLRDAAVMSIMKWELYDELKSLYPNVKMTFGYITKYNRINHGIEKSHVSDAFVISRNFDSERLGYYYKRKLVRRHNRQIHKMKAPKGGNKRMNQSPFKVFGFRLFDKVMFQGKERFIYARRLRGIFNIRDINGENKKDISYKKLEYVSHGLIPIVAG

SEQ ID NO: 18813 - protein, 420 aa, unidentified
MQYVYVLNKHGEPLMPCSPRKARLLLKQKKACVVKRTSFTIKLLYGSTGYKQPITLGVDAGSKHIGISATTEKHELYREEATPRNDVVDLLSARRAFRRSRRNRKTRYRAPRFNNRVHSKHKGWLAPSVEVKIQEHITLIKRVCRILPVTLVRVETAEFDTQRLKAMLEGKPLPVGTDYQLGEMYDEYNVRQYVLKRDNYTCQCCGAHSTKTKDVKLHVHHIETRRTGGNAPNNLITLCTACHKALHAGKVTLDGKKRGKPLKDAAFMGVMRKTLMERLLKELKIPVQGTYGYITKYLREKNGIPKSHTNDARCISKNPLAIPCDTCYYTKAVRHHNRQLHKATILKGGIRKANQAPYIVKGYRLWDKVSCNGTECFITGRRTSGYFALKKLDGTVISNSISYKKLRLLEVATNYITERR

SEQ ID NO: 18814 - protein, 424 aa, unidentified; identical to SEQ ID NO: 11884

SEQ ID NO: 18815 - protein, 424 aa, unidentified; identical to SEQ ID NO: 3351

SEQ ID NO: 18816 - protein, 512 aa, unidentified
MSTVYVLNKNGKPLMPTTRCGHVRRLLKEQKARAVASKPFTIQLLYKTNDVVQPLYLGIDPGRTNIGVAVVKADGTAVFTAHLETRDKEIPKLMKKRKDSRRARRTNGRRCRRQRRAKANGTISKKCVKHDTAQNGSVSKRAKEIGVIKRHLPGCEKDVLCIGIKNKEAKFSNRVKPEGWLTPTANQLLQTHINLVKKIQKFLPISDVVLEVNKFAFMQLDNPNIQKWQYQQGPLYQKASLEEAVSEMQEHHCLFCKKPIDHYHHVVPQHKNGSNTIGNIVGLCAKHHDLVHKDTTWQKKLAKKKTGLNKKYGALSVLNQIIPTLTKELSSLFLKHFFVTNGKSTYDYRAAHGVSKDHWLDAYCIACSVLPNDTCDKTINSRVPYEFKQFRRHDRRALNNENMSRVYTFNGKMVATNRHKATEQTTDSLEEFRQRQPNDVCKLKVKEHHPTYRNMNRNYPGSVFLIGKQVHVMQGIAGSKDGEATTYKDTNANSIAAGKCKFVAKNSGILFV

SEQ ID NO: 18817 - protein, 427 aa, unidentified
MSKVFVLDTNFIPLNPIHSAQARQLLRNKKAAIFRQFPFTIILKKSRPDSPVSSLKLKIDPGARFTGMVLVNDSTGEVVFAAELKHRGFAIRDALTSRRQLRRSRRARKTRYRQPRFLNRTRPEGWLAPSLQSRVENIKTWVEKLRKLAPIQAISQELVRFDMQLMANPDIQGKEYQQGTLAGYETREYLLEKWGRQCAYCGVKDVAFQIEHIHPRAKGGSNSITNLTLSCEKCNTKKGTKDIKDFLKKDPLKLEKILKQAKRPLADAAAVNTTRTALLEVLKATGLPVETGSGGLTKFNRSQQQLEKTHWIDAACVGKSTPILNIKGVKPLLITANGHGSRQSCRTDKYGFPSRHVPREKIHFGFQTGDIAKAVVTAGKKIGTYVGKVAIRSTGSFNISTKNGLIQGISHKFCKRIHAKDGYSYAV

SEQ ID NO: 18818 - protein, 416 aa, unidentified
MVYVLDKNGQPLMPTDRHRKVRLMLQSGQAKVIKRCPFTIQLNYDSGHQTQEISLGIDAGSKHIGVSTTTKIKVLYEVDVELRNDIVDLLSSRRELRRGRRNRKTRYRQAKFNNRRRGNGWLAPSIRQKIGTHLTVVENICKILPISRIMVETASFDIQKIKNPDIQGAEYQQGDQLEFWNVREYVLFRDGHICQCCKGKSKDKILNVHHIESRKTGGNAPNNLITLCETCHTGYHKGTVQLPKAIKRGMRFKDAAFMGIMRWAFYEALKQQYEPVGTPVHNTYGYITKHTRIAYNLPKEHYVDARCISGNPEASSNGEYYYQKKVRCHNRQIHKLTVLKGGIRKQNQATYLVKGYRLFDKVSYQGKGYFVFGRRQSGFFDIRTLSGEKVNKGSLSCKKLKFIATRTYYLTERRAV

SEQ ID NO: 18819 - protein, 420 aa, unidentified; identical to SEQ ID NO: 11059

SEQ ID NO: 18820 - protein, 494 aa, unidentified; identical to SEQ ID NO: 6841

SEQ ID NO: 18821 - protein, 353 aa, unidentified; identical to SEQ ID NO: 3451

SEQ ID NO: 18822 - protein, 420 aa, unidentified
MQYVYVLNKHGEPLMPCSSGKARLLLKQQKACVVKRTPFTIKLLFGSTGYKQPITLGVDAGSKHVGLSASTEKRELYCEEFTPRNDVVDLLSIRKQNRRSRRNRKTRYRAPRFDNRVHSKRKGWLAPSVEVKIQEHITVIKRIRRILPITLVRVETAEFDTQRLKAMLEGKPLPVGTDYQLGEMYDEYNVRQYVLKRDHYTCQCCGAHTTTKKTVKLHVHHLESRKVGGNAPSNLITLCTTCHDALHKGKVSLDGKERGKPLRDAAFMGIMRKTLMARLRDELSIPVQGTYGYITKMRREQNDIKKSHVNDARCISKHPLAEPCSVCYRTKAIRHHNRQTHKANFSKGSIRKRSQMPYVVEGYRLWDKVLYKGQECFVSGRRASGSFALRKLDGTVVTNSISFKKLQLLEPATNYLIERM

SEQ ID NO: 18823 - protein, 537 aa, unidentified; identical to SEQ ID NO: 13531

SEQ ID NO: 18824 - protein, 449 aa, unidentified
VERNETQRRMDRWNETQHYIFQLDSNKQPLDMIPSAKARKLQSQGKAATFRIYPYTIIRNVSFGDNPNTKSYILKIDPGATWTGFAIQCGEEIVFRMELKHRGELIKKSLEQRADFRKGRRSRNLRYRKKRFNRRKPEGWLAPSLRHRLQTVETWIKKFLKFCPITCIEIEQVRFDLQKLENPEISGVQYQQGELQGYEIREYLLEKWGRQCVYCEKQDTSLQIEHIKPKSKGGSNRIGNLTLSCPECNQNKKDQDVKDFLSGKPDLLKRVLAKAPKPLASASAVNSTRYAIVEMAKNLCDHVKCWTGGRTKYNRVNQGLTKSHSIDAACVGESGAKIKVKVNQPLIVESKGHGTKQARRANHKGFPALNKNKQPIKPKTKYTHCFAGDMIKFRLDKDRKTVKAGIYKGRVKTPTPKGFEVKINDCRVSQKMNYLIRFMHRNDGYAYSF

SEQ ID NO: 18825 - protein, 512 aa, unidentified; identical to SEQ ID NO: 16283

SEQ ID NO: 18826 - protein, 434 aa, Anoxybacillus sp.; identical to SEQ ID NO: 3421

SEQ ID NO: 18827 - protein, 512 aa, unidentified; identical to SEQ ID NO: 12631

SEQ ID NO: 18828 - protein, 464 aa, unidentified; identical to SEQ ID NO: 4559

SEQ ID NO: 18829 - protein, 406 aa, unidentified; identical to SEQ ID NO: 4082

SEQ ID NO: 18830 - protein, 450 aa, unidentified; identical to SEQ ID NO: 6127

SEQ ID NO: 18831 - protein, 266 aa, unidentified
KAVAEGKPVPQGEDYQKGEMYGHYNVRQYVLWRDSYTCRICGVNGSVRKGVPLHVHHLESRRVGGDAPDNLVTLCTACHDKLHKGIIMAADIKKRKRRSTRDATFMGIMRMTLLRRLREQLPVPVVETRGYITKATRENLLVLPKSHTNDALAIAHGPQGFRAEYLPNIRQADQLYTIRPVRHHNRQLHKATILKGGVRTANQAEKYICGFRLYDKVLYNGIECFVWGRRTSGSFLLRQLNGEKVKDGVSYKHLKLLERSQSYLVA

SEQ ID NO: 18832 - protein, 557 aa, unidentified
MIYNLGSTRERGFMKQKKQKVMVYILNKKGKPLMPTTRCGHVRKLLDSKKAVVVNSNPFTIRLKYDTPNGVQDVFAGIDSGRENIGSGASNEDGDCLYLGELKTSNKSIKIKMTERTGFRRERRKHDRQNKQRKARKDHTEIQNGKDDICRATISCKSVQISYPVAEESVTHKIIRGKEGKFANRHRDEGWITPSARQLVQMHMNDLKSICKILPISHVTLERVAFDFQKLENENIKVWEYGKGKLYGYDSPEEYIHDVQDGKCLVCGKPHIDYLHHIIPRSKGGSDKVSNIAGLCYDCHYGPIGVHNCQDTQDRLPELKNEANKQYKVSLLNSVMPVLIEEMDKFCKANSIMFSICEGHDTAKVRDMYDLQKDHCLDGFAISLVGRNVKSVDVMPDRIHQKQRYKKKSKNIIQKRNCREYYDGKKLVAVNRHKGTDQKADSLEEYMNTYAETHTADECKMHFESLTVKPARRTYTFHKEGRICPLHIGDKVRYEKKNKIKGNTKVDTFICEGIYFSKDENKAKVEHNKTKSKKMKFCRAIESGCIPYIDYIKLALI

SEQ ID NO: 18833 - protein, 433 aa, unidentified; identical to SEQ ID NO: 7454

SEQ ID NO: 18834 - protein, 404 aa, unidentified
LLKEKKAIVVRRTPFTIQLTIATGESKQPVSLGVDAGYKHVGLSASIEKAELYASEVELRKDITDLLSARRALRQSRRNRKTRYRAPRFDNRIRTKRKGWLAPSVENRINAHLSRIEAVLRLLPITKITVETASFDMQRLKNPDISGKEYQEGEQLGFWNVREYVLFRDGHVCRHCHGRSKDPVLNVHHLESRRTGSDSPDNLITLCETCHKALHRGEITLKAKRGQSFRAQAFMGIMRREVLNRLKASYPELKVHETYGYLTKHARIANGIVKSHGADAFCIAGNLGAERLGEFFFQKQTRRNNRQIHKLSILKGGIRKRNQAPFEAKGFRLFDKVACQGEEGFIFGRRSSGFFDVRKLDGTRISAGISCKKLHLLEKRRTYLTEIRKEEALPPLPEGRGLRA

SEQ ID NO: 18835 - protein, 439 aa, unidentified
MVLVIDRQKQPCNTISAAYARILLFTKQAVIHKRFPFTIRLRNDNAVLKDRSYTVKLDPGSRTTGVAITDDQDSVVMLAELEHRGHIIKKNLDSRRAIRRSRRQRKTRYREVRFLNRTKPEGWLAPSVKSRADNVINFIKKYNKLINIDRVMIENVSFDTAQMSSDTKLWGNDYQQGNLYNKNLREFIFSKTKGRCSYCEEKATEIDHIVPRAKGGTNSTYNLTPACRSCNEKKSNLSLKEFGKLMNKDYSKLEPKKLPKDAAIVQSARNYMVKEITKIIPDTTIHEAWITKYNRDQLGLPKQHYYDALSVGEIPSKFNFLTDKILQISAKGRGSRQMCRMDSYGFPRTSAKASKSVKGFQTGDIVKAVVPTGSKQGEYLGRVAVRSRGFFDIKTKSNLVKDIGYKFCRLLQRNDGYSYNYKERDFLLAMNCRVSVAEF

SEQ ID NO: 18836 - protein, 423 aa, Arthrospira sp.; identical to SEQ ID NO: 3160

SEQ ID NO: 18837 - protein, 440 aa, unidentified; identical to SEQ ID NO: 16940

SEQ ID NO: 18838 - protein, 465 aa, unidentified
MSTCVCVLSNSGERLMPTFRLGKVRRLLKDGKAKIVKHHPFTIQLLYDSKTNTQPIEICEDVGYNYIGISVKSESREYVSAQYDTLQDEKEHHDDCRKYRRTRRNRLRYRKPRFDNRKCSEGWLAPSLEHKKQLNIRLIERYVSVIPITHATVEVGSFDTMLLQAIQKGKSKPEGVDYQKGPRYNLATLREAVFYRDNYTCQVCGRKIADGAILHMHHMFYWKGRHGDSLNELLTVCEKCHTPANHQKSGKLYGFGENVKFADLSGAAFMNAVRWQIVNELYTAFGKPFVTITYGTMTKEKRIALRLEKSHNNDAYAMGEFHPNHRCTFEHYEKVRRNNRTLEKFYDSRYIDIRTGEVATGKALFNGRINRNHKKDSENLHKYRGKRLYKGHRALVRKKVNFNPGDLVSLNGEVLVVHGTHTNKKGAVNVEFKTPAKNGRKSANLKKLKIVKAAGSIHPAWEKVS

SEQ ID NO: 18839 - protein, 424 aa, unidentified; identical to SEQ ID NO: 8578

SEQ ID NO: 18840 - protein, 477 aa, unidentified
MKSHKSVLVIGMNGIGLMPTTACKARKLLEAKKAKVYSKMPFTIKLLYKTGCAVQNISLGIDTGSQHIGVAVTTDNCVQLKDEHELRSTMEKRKLIETRAEARRSRRYRKTRYRKPKFKPHCKHVYMNSMTKRHGHKTHWHNVKNEYGTNRQPGWVPPSIQQKIDHHIQIINRYLEALPKKTKVNIEVGRFDTQKVKNPDIKGKQYQLGRMYDYENKKAYILAKYDYKCPICGRKFGSVRENGSIVKFRKHHLHFVSNGATDNPDSYMAICDCCHTAEAHGDGGILNKIMKESKKTSRGLRDMPFMNILRRRLWKAFPEACFTYGNITNADRKWISLPKTHANDAVAIAMHEYLQQAKSYDVKDVPYTKIYKEVRKKKRSLHEMNPRKGRRIPNTSATRNSKNTKSVINKHRTFSLYDKVRYAGQIGWITGFSGTNTAYLKNKEGKYITIQGKNYKNIPLSNVQILERNNTWITYTK

SEQ ID NO: 18841 - protein, 480 aa, unidentified
LYTKPLDNIGEGSLPPSGEINLKGMTFMVYVKSIDGKALMPTSNAKARKLLKQKKAKVVSLRPFVVKLTYKTKTEYIQKLNLGVDSGYSNIGFSVIDAKQEYIAGEVKLLEGMKKRLLEKASYRRIRRSRLRYRKARWNNRVKSKKKGWLAPSLKHKLDTHIKFIDYLKNILPIEKITIEVANFDIQKMKDDLISGIDYQNGDMFGFWNVREFVLHRDGHKCQNPNCKHKDKKEQILKVHHIRYRSEGGSDRPENLITLCSKCHIPANHKKGKFLYDWCVNGKKVRGFKDATFMSMIRWYLVNELKSKHNNVSITYGYITKNHRIQNGIEKSHLNDAFAITKGTNQARTKDRFLVIQDRLKNRSLEKFYDSKIIDIRTGKKVSGGDLSCGRSTRNKNLNTENLRKYRGAKISKGQRRIRKQKYFYQSNDLVKYDGKVYTVKGTQNEGKYIALKEIKKVPKVELLIPYVFKKGLNWSYGLC

SEQ ID NO: 18842 - protein, 413 aa, unidentified; identical to SEQ ID NO: 9603

SEQ ID NO: 18843 - protein, 446 aa, unidentified
GVAVVKADGTAVFTAHLETRNKEIPKLMKKRKDSRRARRTNGRRCRRQRRAKANGTISKKCVKQTTAQNGSVSKRAKGIGVIKRHLPGCEKDVLCIGIKNKEAKFSNRTKSEGWLTPTANQLLQTHINLVKKIRKFLPISDVVLEINKFAFMQLDNPNVQKWQYQQGPLYQKANLEEAVSEMQEHHCLFCKKPIAHYHHVVPQSENGSNTIGNIVGLCTKHHDLVHKDTAWQKKLAKKKTGLNKKYGALSVLNQIIPALTKELGSLFPKHFFATNGKSTYDYRAAHGVRKDHWLDAYCIACSVLPNDVCDKNINSRVLYELKQFRRHDRRALNNENMSRVYTLNENVVATNRHKATKQTTDSLEEFRQNHPDDACKLKVKEHHPTYRNMSRNYPGSVFLVGNQVHVMQGVAGSKDGKATTYKDTNANSIAAGKCKFVAKNSGILFV

SEQ ID NO: 18844 - protein, 427 aa, unidentified; identical to SEQ ID NO: 2980
  source 1..427: note = Cyanobacteria bacterium UBA11159

SEQ ID NO: 18845 - protein, 279 aa, unidentified
VVVETAEFDLQLLKAIADGKPVPQGEDYQKGEMYGHYNVRQYVLWRDNYTCQCCGTHPSKKKEVRLHVHHLESRKVGGDAPDNQVTLCESCHEKLHKGLIAEKDFKKRKRRSTWDATFMGIMRKTLMQRLCSELPIPVIETRGYITKATREKLLVLPKSHTNDALAIAQGKRGFNVGYLPEIAQIDKIYTIRPVRHHNRQLHKATILKGGIRKSNQTEKYVFGYRLFDKVQFNGQDCFIWGRRTTGIFTIKTINGKMIKDGISFKKLKPVEKSTGYLIA

SEQ ID NO: 18846 - protein, 408 aa, unidentified
LKVFVLNMRGKPLMPCSPAKARHMLKAGKAFVVRRTPFTIKLTIATGETKQDVTLGVDAGARHVGISATTEKEEVFASEVALRQDITGLLADRLAFRRARRNRKTRYRAPRFNNRVRSKHKGWLASSVENRIQAHMSRIEAVCRLLPVTKIVIETASFDIQKIRNPEVEGTGYQQGDQLGFWNVREYVLFRDGHICQHCRGRSKDPILNVHHLESRKTGGDAPNNLITLCETCHKAYHAGKIKLKVKRGQSFRAEAFMGIMRWTLLNRMRKAHPSLPVENTYGYLTKHKRIALGLPKTHCADAFCIAGNLKALRRGDFLFQQQTRKHNRQIHKCSILKGGVRKLNQAPFLVKGFRLFDKVRIGGQIGFVFGRRVRGTFNIRRLDKTVIGTDINCKKTESSRNTQNFFD

SEQ ID NO: 18847 - protein, 442 aa, unidentified; identical to SEQ ID NO: 2834

SEQ ID NO: 18848 - protein, 431 aa, unidentified
MPNKVYVINKHGRPLMPCSPAKARHLLDEGKAKVKKRTPFTIQLVYGSSGYTQEVILGVDAGSKTIGLSASAETEELLSAEVKPRNDVVDLLSTRREFRRARRNRKTRYRKPRFDNRVRSKHKGWLAPSVEVKIQEHITSIRRVCRILPVSKVVIETAEFDLQLLKAIEEGKPVPQGEDYQQGEMYGHYNVRQYVLWRDGYTCQCCGAHATKKKEVRLHVHHLESRKVGGDAPDNQVTLCESCHEKLHKGLIAEKDFKKRKRKSTRDATFMGIMRKTLMQRLCSELPIPVIETRGYITKATREKLLVLPKSHTNDALAIAQGKQGFNVGYLPGIVQINKIYTIRPVRHHNRQLHKATILKGGIRKSNQAEKYVFGYRLFDKVQFNGQDCFIWGRRTTGIFTIKTINGKMIKDGISFKKLKLAEKSTSYLIA

SEQ ID NO: 18849 - protein, 468 aa, Sulfobacillus sp.
VAGRTSRLNLGEERFSQENVTSPVRGRKKDRMVFVLDKHQKPLMPCSEKRARLLLERGRARVVKIAPFTIRLVDRRQEDSVLQGLRLKLDPGSKTTGVAIALDGAHGTKVVFLGEIVHKVGIKAKLDARRALRRGRRHRKTRYRKPRFQNRARKDGWLPPSLVARINQTLHALTKIRTHAPITDLSVEHVRFDTQKLDNPEISGVEYQQGTLLGYEVREYLLEKWGRTCVYCGATDVPLQVEHIIPKLRGGSDRISNLTIACEPCNLQKGQQTAAEFGHPDIQAQARKPLKDAAFMNATRWRLYAQLQATGVPVEGGSGGRTKKQRIAHGLPKEHYYDALCVGESTPERFTSFPASVQVWTAKGRGMRQICRTDKQGFPIRHVSRHKHHFGFQTGDLVQAVIPHGKYTGTWTGRATVKVSGQIRIVTSIGVHPTTSYRYCRVLQRGNGWVYTQKPLNPERRQAAASPA

SEQ ID NO: 18850 - protein, 421 aa, unidentified
MRGQPLMPCSPAKARHLLKAGKAVVKRRTPFTIQLRIATGETKQNVTLGVDAGAKHVGLSATTEKEEVFASEVELRQDITGLLAARLSLRRDRRHRKTRYRAPRFLNRVRSKHKGWLAPSVENRIQAHMSRIDAVCRLLPVTKIVIETASFDIQKIKDPSVEGTDYQQGDQLGFWNVREYVLFRDGHVCQHCHGHAKDKILNVHHLESRQTGGDAPNNLITLCETCHKACHAGKIKLKVKRGQSFRAEAFMGIMRWTLLDRVRKAHPGLPVENTYGYLTKHTRITHGLPKTHCVDAYCIAGNLKAVRRGVYLHQRQMRKHNRQIHKFTVLSKRLEDGTKIGYRKLNQSPYLVHGFRLFDKVRCLGQIGFIFGRRSSGYFDVRRLDGVKISSCISYRKLTLLEKRSTYLTELRKEDGASSPV

SEQ ID NO: 18851 - protein, 412 aa, unidentified
MENTLKVFVLNMRGQPLMPCSPPKARKLLRAGKAVPVRRTPFVIQLTVPTGETKQPITLGVDAGYKHVGLSATTAKEELLASEVELRQDVTGLLSDRLALRRARRNRKTRYRAPRFDNRVRSKHKGWLAPSVENRIQAHISRIEAVCRVLPITKIVIETASFDIQKIKNPEVEGTDYQQGEQLGFWNVREYVLFRDGHVCQACKGRSKDLILNVHHIESRKTGGDAPGNLITLCEACHKAYHAGKLKQFSPRRGASFRAETFMGIMRWTVLNRLRERHPELPVTNTYGYLTKHKRIVAGLPKTHCADAFCIAGVLDAKRRGEYLFQKQTRRHNRQIHKLTILKGGVRKRHQAPYLVHGFRLFDKVLCKGEVGFIFGRRSSGAFDVRRLNGTKISAGISYKKLSLLEKRKTFF

SEQ ID NO: 18852 - protein, 520 aa, unidentified
MNYLDFVFMVDKDKVPCIPIKESTAAYLLRHNKAKIINHDPTVIQRLDEYSADYEIRNIFELKIDSGYLNIGFSVSDSEHEYLAGQVNLLQGMSERLTVRASNRKFKRARLRYRKNKNVDYKTVHNSTYKNGNQDGWIAPSIQHKIDSHIRLIKKIAQWVPIDRIIIEVAKFDIQKMIADLDGRIISGKDYQNGEMKGYENVTAYVRDRDKHTCQMCLSSGKVKNKNNDTIEVHHIIPRSAGGTNRPSNLICLCHHHHRLVHSNNNNNKYFRELQNKKMPDTYKDSTFMNIVRYKIYNALCADFKDVELAYGYETKINRKLIGLPKFHYTDAVCLKEWKNISLTKFIYIVDQKRCNDRKMESFFDAKYIDIRDGKTKSGTELCYTRLDNASSWRTTCKNEVDNLRQYREKKVEKGKQRRECHFYCLKAGDLIFIKSGNHKGNLAEVKTMQIHKGKYKIFFTYKNQKVDNPTISLSPEEYGQLKKNECSKVKIVRTRRGMIWRKYNRLEYENTYKDQYDKN

SEQ ID NO: 18853 - protein, 292 aa, unidentified; identical to SEQ ID NO: 2733

SEQ ID NO: 18854 - protein, 451 aa, unidentified
MSVAVISNIGERLMPTSEYRARKLLKSGKAVKCSYHPFTIQLTERKAGDVQPIELCMDTGYIHIGISVKSEKHEYLAEQIDTLTNERTRHDACRMYRRQRRGRKRYRQPQFNNRKRDKGWIAPSLEHKKDIHIQAISRINKVMPLTDITMEMGNFDTQVLRAKEEGKPLPQGADYQHGERYGTATLREAVFSRDNYKCQCCGKTISDGAILHVHHIKYRSRGGTNSMTNLATVCDKCHTPKNHKPGGKLYDWKPKLPDFKGTTFMTTIRWQLYNEVKSLFLDINIHVTYGAATKEQRRKLNIGKSHVNDAFVMGKFYPKHRANAVLYKKKRRNNRCLEKFYDAKYIDSRDGSKKTGQELFNGRINRNHKKDSENLHQYRLQKTTAGKRTVRKKHYSIQPHDIVIYENRKRETSGCHCNGTGVILLPDKKSVSIKKVKIYKYAGGYFKSAFN

SEQ ID NO: 18855 - protein, 420 aa, unidentified; identical to SEQ ID NO: 8934

SEQ ID NO: 18856 - protein, 431 aa, unidentified
MPNKVYVLNKHGRPLMPCSPAKARHLLDAGKAKVKKRTPFTIQLVYGSSGYTQEVILGVDAGSKTIGMSASTTKEELLSAEVKPRNDVVDLLSTRREFRRVRRNRKTRYRKPRFDNRVRSKHKEWLAPSVEVKIQEHITSIKRVCRILPVSKVVIETAEFDLQLLKAIADGKSVPQGEDYQKGEMYGHYNVRQYVLWRDNYTCQCCGAHATKKKEVRLHVHHLESRKVGGDAPDNQVTLCESCHEKLHKGLIAEKDFKKRKRRSTRDATFMGIMRKTLIQRLHAELTIPVAETRGYITKATREKLLVLPKSHTNDALAIAQGKHGFNVGYLPEIAQIDKICTIRPVRHHNRQLHKATILKGGIRKSNQTEKYVFGYRLFDKVQFNGQDCFIWGRRTTGIFTIKTINGKMIKDGISFKKLKLVEKSTSYLIA

SEQ ID NO: 18857 - protein, 455 aa, unidentified; identical to SEQ ID NO: 10285

SEQ ID NO: 18858 - protein, 431 aa, unidentified; identical to SEQ ID NO: 14757

SEQ ID NO: 18859 - protein, 426 aa, Parasutterella sp.; identical to SEQ ID NO: 3045

SEQ ID NO: 18860 - protein, 512 aa, unidentified; identical to SEQ ID NO: 4350

SEQ ID NO: 18861 - protein, 470 aa, unidentified; identical to SEQ ID NO: 2925

SEQ ID NO: 18862 - protein, 419 aa, Butyrivibrio sp.; identical to SEQ ID NO: 9770

SEQ ID NO: 18863 - protein, 408 aa, unidentified
MVYVQDINGKPMMPTTRHGKVRRLLKDKKAVVVNLCPFTIKLMYVTSDYKQEIVLGVDAGTKHVGLSATTKSKELYSSEVILRNDIVDLLSTRRELRRTRRNRLRHRKHRFNNRIKSRRPGWVAPSVKYKIDAHIRVIDNVFSILPISRIVIEVAQFDTQKINNPNISGKEYQEGDQLRFWNVREYVLARDGHKCQYCKGKSKDAILNVHHIESRKTGGDSPSNLITLCETCHKEYHKGNIDLKIRRGKSLRDAAVMGIMKWRLYEELKSKYDRVSMTFGYVTKYNRINHDIEKSHVSDAFVISKNFNAIRLGYYYKVRLVRRHNRQIHKQKIPKGGIKRLNQSPFEVFGFRLFDRVMFENSYYFIFGRRKTGSFNIRDIDGKKQKDITYKKLKLSRCKRFMIQKEMN

SEQ ID NO: 18864 - protein, 406 aa, unidentified; identical to SEQ ID NO: 6079

SEQ ID NO: 18865 - protein, 410 aa, Desulfobacterium sp.; identical to SEQ ID NO: 5848

SEQ ID NO: 18866 - protein, 422 aa, unidentified
LNKRGKPLMPCSPAKARLLLKEKKAIVVRRTPFTIQLTIATGESKQPVSLGVDAGYKHVGLSASTEKAELYASEVELRKDITDLLSARRALRQSRRNRKTRYRAPRFDNRIRTKRKGWLAPSVENRINAHLSRIEAVLRLLPITKITVETASFDMQRLKNPDISGKEYQEGEQLGFWNVREYVLFRDGHVCRHCHGRSKDPVLNVHHLESRRTGSDSPDNLITLCETCHKALHRGEITLKAKRGQSFRAQAFMGIMRREVLNRLKASYPELKVHETYGYLTKHARIANGSVKSHGADAFCIAGNLGAERLGEFFFQKQTRRNNRQIRKLSILKGGIRKRNQAPFEAKGFRLFDKVACQGEEGFIFGRRSSGSFDVRKLDGTRISAGISCKKLRLLERRRTYLTEIRKEEALPPLPEGRGLRA

SEQ ID NO: 18867 - protein, 438 aa, unidentified
MDASLVCSSTTLPLNKLETVSVVGKVLGCNNPEVKNKRQQVARLKVFIPVLSIAGSPLMPCTFTKAKRLLKRGKAKIVNRNPLIIRLTFSCENQTQPIVLGVDTGYSTIGFSTVTGNKELVSGELLLDNNTNKRLTERKGYRRNRRNRLRYRKPRFDNRSIPKGWLPPSVRRRFDTHVKLIANLRKWIPITTIVVEMCKFDIQKIINPKIAGKGYQQGNLYEYNNLKDFLFFREQGKCQFCGKKIEINQKAHLHHVIPRAENGTDRPDNIALLHKDCHDKLHKGKFFKINKAKQYKTETFMSIISKKLQEILSCEITYGYITKTKRKLLGIEKSHANDAFVIAKGNAQERCAPYRVEQKRINNRILQTNRKGFIPSIRKQRYKIQNRDFVWINGNKYLCGGTSSRGKEVRYFYNNEKKFAGIKKIEKVYHTNSLVWVS

SEQ ID NO: 18868 - protein, 481 aa, unidentified
VRSKTTTHHVKLRQSRQVWLYQAVYNLGEGFLPSSEEKTAFYWLLIYRKEHGIMQYVYVLNKHGEPLMPCSPRKARLLLKQKKACVVKRTPFTIKLLYGSTGYKQPITLGVDAGSKHIGISATTEKHELYREEATPRNDVVDLLSARRAFRRSRRNRKTRYRAPRFNNRVHSKHKGWLAPSVEVKIREHITLIKRVCRILPITLIRVETAEFDTQRLKAMLESKPLPVGTDYQLGEMYDEYNVRQYVLKRDNYTCQCCGAHPTKTKAVKLHVHHIETRRTGGNAPNNLITLCTACHKALHAGKVTLDGKKRGKPLKDTAFMGIMRKTLLERLRKELKIPVQGTYGYITKYLREKHGIPKSHTNDARCISKNPLAIPCDTCYYAKAVRHHNRQLHKATILKGGIRKANQAPYIVKGYRLWDKVSYNGTECFITGRRTSGYFALKKLDGTVISNSISYKKLRLLEVATNYITERKRRGNSSHD

SEQ ID NO: 18869 - protein, 428 aa, unidentified; identical to SEQ ID NO: 4440

SEQ ID NO: 18870 - protein, 432 aa, unidentified
MSSARYWHEEKFSGRKVSEMTDYAFVLDANGKQLAPTKEQKAWFLIRRKRATLVSKYPMVIQLKKKIPDNEICKDEVRCGIDDGGLHVGVALVQKCQTRNKVVFKGTIEQRNDVKHLMDVRRGYRSYHRYHKRYRPARFNNRSSSKREGRIAPSILQKRQATIRVINQLNKWINITNYWLEDVAIDIRALTDGYKPYRWQYQKSNRLDENIRKAVILRDGCRCMECGKSNCRLEVHHIKPRRLKGSSTLGNLITLCTKCHQKTEGVEELYMDRYFALLNSSDNRNLDYAQHVMIGKEWLREQLSNLGMLYLTNGGDTANKRIDWDITKSHSNDAICITDLRPDTCEIKEWVIKPMRRQSKAKTDNVLGIKHRDLVEYTFRNGETHIGYVTALYPEQNAINFQSPAKHCKKVNAGKCKVLWKYSKIYWLDNVS

SEQ ID NO: 18871 - protein, 419 aa, Moorena sp.; identical to SEQ ID NO: 2828

SEQ ID NO: 18872 - protein, 451 aa, Blautia sp.
MSVAVISKTGERLMPTSEYRTRKLLKSAKAIKYSYHPFTIQLTERETGDIQPIELCMDTGYIHIGISVKSEKHEYLADQIDTLTDERSRHDACRMYRRQRRNRKRYRQPRFNNRKKDKGWIAPSLEHKKDIHVQAISRINNVMPLTDITMEMGNFDTQVLKAKEEGKPLPQGADYQHGERYGIATLREAIFARDGYKCQCCGRTIKDGAILHVHHVKYRSQGGTNSMSNLATVCDKCHTPKNHKPGGKLYGWKPKLSSFKGATFMTTIRWQLYNEIKTLFPDIVIHITYGAATKERRRELNIDKSHVNDAFVMGQFHPKHRIKAVLYKKKRRNNRCLEKFYDAKYIDSRDGKKRSGQELFNGRINRNHKKDSENLHQYRLQKVTAGKRTVRKQHYKIQPHDIVIYENRKRETAGCHCNGTRMMLLPDKKSASIKKVKIYRYAGGYFKSAFN

SEQ ID NO: 18873 - protein, 451 aa, unidentified; identical to SEQ ID NO: 6577

SEQ ID NO: 18874 - protein, 414 aa, unidentified
MPCSPAKARLLLKEKKAIVKRRTPFTIQLTIATGESKQPVSLGVDAGYKHVGLSASTEKAELYASEVELRQDVSDLLSARRALRQSRRNRKTRYRAPRFNNRLRTKRKGWLAPSVENRINAHLSRIEAVLRLLPVTKITVETASFDLQLLKNPDISGKEYQEGEQLGFWNIREYVLCRDGHVCQHCYGRSKDPVLNVHHLESRRTGGDSPGNLITLCETCHKALHRGEITLKAKRGQSFRAEAFMGIMRWEVLNRLKASHPELEVNNTYGYRTKHARIANDIAKSHCADAFCIAGNLGAERLGEFFFQKQTRRNNRQIHKLSILKGGIRKRNQAPFEVNGFRLFDKVACQGEEGFIFGRRSSGFFDVRKLDGTRISAGISYKKLHLLEKRRTYLTEIRKEEALPPLPEGRGLRA

SEQ ID NO: 18875 - protein, 419 aa, unidentified; identical to SEQ ID NO: 5677

SEQ ID NO: 18876 - protein, 431 aa, unidentified
MPNKVYVINKHGRPLMPCSPAKARHLLDAGKAKVKKRTPFTIQLVYGSSGYTQEVILGVDAGSKTIGVSASTKKEELFAANVIPRNDVVDLLSTRRESRRARRNRKTRYRKPRFDNRVRSKHKGWLAPSVEVKIQEHITSIKRVCRILPVSKVVVETAEFDLQLLKAIADGKPVPQGEDYQKGEMYGHYNVRQYVLWRDNYTCQCCGAHATKKKEVRLHVHHLESRKTGGDAPGNLVTLCESCHEKLHKGLITEKDFKKRKRRSTRDATFMGIMRKTLMQMLCSELPIPVIEIRGYITKATREKLLVLPKSHTNDALAIAQGKQGFNVGYLPGIEQIDKIYTIRPVRHHNRQLHKAAILKGGIRKSNQAGKYVFGYRLFDKVQFNEQDCFIWGRRTTGIFTIKTINGKMIKDGISFKKLKLVEKSTSYLIA

SEQ ID NO: 18877 - protein, 456 aa, Halomonas sp.; identical to SEQ ID NO: 2773
  source 1..456: note = isolate UBA1491

SEQ ID NO: 18878 - protein, 480 aa, unidentified
MAEEEKQKLGKWITPWDAAQVPCSVADGLNRGERVASVSIGVKTFPNSAYEQERSGKSGQDVRVPVSNMRGEPLMPTTARKARKFLEQGKAKVVGYNPFTIQLLYGTGETKQEIVLGVDAGYAHIGYSAVTAKEELISGELELRTDIKRLLDKRRAYRRTKRNRLWYRKPRFLNRGKEGWLAPSIKHKLKSHIKLIERLNSIIPITKIVVEVASFDTQKMQNHEITGIEYQQGTLQGYNVRNYLLEKWKRKCAYCGQANVPLEVEHIIPKSRGGSDRVSNLTIACHKCNDEKGTQTAAEFGRLGIQNKAKKPLKSAAFMNIIRWKVVDHFKCKWTYGHKTKYGRIKAGLDKSHINDAFIIAGGKTQKHTGKNIIEKQVRRQNRSLYKANIQKGGMLKRNTVKEVKEFRRFDKVEYKNKEFFIFGLRSSGYFNLKNIEGEKVTDSVSLKKLTFIERARGKIAEVRRAIPPCAEAHSLLASG

SEQ ID NO: 18879 - protein, 447 aa, unidentified; identical to SEQ ID NO: 9829

SEQ ID NO: 18880 - protein, 406 aa, unidentified; identical to SEQ ID NO: 6526

SEQ ID NO: 18881 - protein, 512 aa, unidentified; identical to SEQ ID NO: 8121

SEQ ID NO: 18882 - protein, 449 aa, unidentified
PTFRLGKVRRLLKDGKAKIVKHHPFTIQLLYDSKTNTQPIEICEDVGYNYIGISVKSESHEYVSAQYDTLQDEKEHHDDCRKYRRTRRNRLRYRKPRFDNRKRGEGWLAPSLKHKKELNVNVVKMYCAVMPITHATVEVGSFDTMLVKAIQEGKAIPEGADYQKGPRYNLATLREAVFYHDNYTCQVCGRKVADGAILHMHHMFYWKGRHGNSLDELLTVCEKCHTPANHQKGGKLYGFGENVKFADLSSAAFMNTVRWQIVNELYAAFGKDFVTVTYGAMTKEKRIALRLEKSHNNDAYAMGEFHPNHRCTFEHYEKVRRNNRVLEKFYDSRYIDIRTGEMATGKALFNGRINRNHKKDSENLHKYRGKRLYKGHRALVRKKVNFNPGDLVSLNGEVLVVHGTHTNKKGAVNVEFKVPAKNGQKSASLKKLKIVKTTDSMHSAWKKVS

SEQ ID NO: 18883 - protein, 412 aa, unidentified; identical to SEQ ID NO: 6913

SEQ ID NO: 18884 - protein, 470 aa, Thermoanaerobacterium sp.; identical to SEQ ID NO: 15617

SEQ ID NO: 18885 - protein, 419 aa, unidentified
MLNNQKEYAFVLDAEGKKLDPTIIQNAWRLVRQKKATLIAKRPMTIQLKKVVDTLNNDEIRMGIDDGAKYVGLALVQKCKTKNKVIFVATMEHRIDVHKKIVQRHEYRRYRRYLKRYRKDKSLNRANSRKQGWISPTIKQKRHAVIRIVDVLSKYICIDSIYLEDVAIDIRVLTEGHQIYGEQYQISNRLDENLRKATVLRDNCKCQLCGKKNCRLEVHHITPRRMNGSNTIGNLITLCSDCHSKVTGREMEFADQFYSKIGKKRNNYGLIYASHVMIGKTWLREELAKRAQLTLTTGGDTANKRINWNLEKSHEVDAVCITSLRPEFVNVKKWRIKPLRHQIKKRKTIEVLRFRHRDIVSYVYRNGEYHEGYVTAIFPLSKRRKENLSFQSQTKHCCRVAINKCKFICRPNKFYWLSS

SEQ ID NO: 18886 - protein, 333 aa, unidentified
LDANNKQLTPTKEQKAWFLIRKKRATLVSKYPMVIQLKKKIPDKEICKDEVRCGIDDGGLHVGVALVQKCQTRNKVVFKGVIEQRNDVKHLIDVRCGYRRYHRYHKRYRSARFNNRNSSKREERIAPSILQKRQATIRVINQLNKWINITNYWLEDVAIDIRALTDGYKPYRWQYQKSNRLDENIRKAVILRDGCKCMECGKSNCRLEVHHIKPRRLKGSSTLDNLITLCTKCHQKTESVEELYMDRYFALLNSSDNKNLNYAQHVMIGKKWLREQLSNLGMLYLTNGGDTANKRIDWDIAKSHSNDAICITDLRPDTCEIKEWVIKPMRKQS

SEQ ID NO: 18887 - protein, 412 aa, unidentified
MPNKVYVINKHGRPLMPCSPAKARHLLDAGKAKVKKRTPFTIQLVYGSSGYTQEVILGVDAGSKTIGVSALTKKEELFAANVIPRNDVVDLLSTRREFRRARRNCKTRYRKPRFDNRVRSKHKGWLAPSVEVKIQGHITAIRRVCGILPVSKVVVETAEFDLQLLKAIEKGKPVPQGEDYQQGEMYGHYNVRQYVLWRDDYTCQCCGAHTTKKKEVRLHVHHLESRKTGGDAPSNLITLCDSCHEKLHKGLIAEKDFKKRKRRSTWDATFMGIMRKTLMQRLCSELPIHVVETRGYITKATREKLLVLPKSHINDALAIAQGKHGFNVGYLPGILQIDMIYTIRPVRHHNRQLHKATILKGGIRKSNQTGKYVFGYRLFDKVQFNGQDCFIWGRRTTGIFTIKTINGKMIKD

SEQ ID NO: 18888 - protein, 478 aa, Acidiferrobacter sp.; identical to SEQ ID NO: 4550

SEQ ID NO: 18889 - protein, 456 aa, Halomonas sp.; identical to SEQ ID NO: 2773

SEQ ID NO: 18890 - protein, 425 aa, Moorena sp.
MSTNYVLVLDTNRKPLNPCKPGMARSLLKAGKAAVFKQYPFTIILNKAVDDAPKPVQLKIDPGSKVTGLALVQDDKVLWGAELYHRGQQIKADLEDRRKLRRGRRNRKTRYRQPRFLNRTRPEGWLAPSMLHRVLTTMTWVRRLTKFVPVTGISLERVRFDMQKMINPEVSGVDYQQGELQGYEVREYLLEKWNRQCAYCQATDTRLEVDHIHPKSKGGSDRVSNLTVACHDCNQAKGNRNITDFLSGKSDLLNRILSQVKQPLLDAAAVNSTRNKIAEELIATGLPIEFGTGGQTKYNRCRLDLPKTHWLDAACVGVVVHLTLETKQCLTITASGHGNRQMAGVDKYGFPYRHRTRQQVHFGFRSGDIVRAVVPKGKKAGTHLGRVLCRKSGSFDIQTKSGRVTGINHKYCSTIHGRDGYAYVF

SEQ ID NO: 18891 - protein, 494 aa, unidentified
MTIVYVQNKDGKPLMPTTRYCYVRLLLKEKKARVVSRTPFTIQLNYDTPDVTQDLILGVDPGRTNIGVAVVKKDGSCVFSAHLETRNKDVPLLMKKRAAFRKNHRTLDRRRKRQRRAIAAGTIVESNTIEKLLPGYEKPVVCHYIRNKEARFNNRSRPAGWLTPTANHLLQTHINLIAKVTKFLPITKVVVELNRFAFMAMDNPNIRRWEYQQGPLYGLGSVEDAVYAQQDGHCLFCKKPIDHYHHVVPRHKGGSETLVNRCGLCAKHHDLVHKDKAWAEKLVTRKGGMNKKYHALSALNQIIPHLMEYLGSETPYDVYATDGKSTKGFRIAKNVPKEHYTDAYCIACSILDADTKVSAPAEPFKLKQFRRHDRQSCIRQMADRKYLLDGKVVATNRHKAIEQRSDSLEEFREAYGDAAVSQLTVRPHSPQYKDMNRIMPGAVMDFNGTIGVMQCSGGRNNGKVEFFKSTKGNKTTPKKCVLLAQNAGMVFIPA

SEQ ID NO: 18892 - protein, 494 aa, unidentified
MTMVYVQNKDGKPLMPTTRYCYVRLLLKEKKARVVCTTPFTIRLNYDTPNITQDLILGIDPGRTNIGVAVVKEDGSCVFSAHLETRNKEVPLLMKKRAAFRRQHRTQDRRRKRQRRAIAAGTTVESNTIERLLHGYEKPIVCHHIRNKEARFNNRSRPAGWLTPTANHLLQAHINLIAKAAKFLPITKVVVELNRFAFMAMDNPNIRRWEYQQGPLYGLGSVKDAVYAQQDGHCLFCKKPIDHYHHVVPRHKGGSETLANRCGLCEKHHALVHKDKAWAEKLVTRKGGMNKKYHALSVLNQIIPHLMEYLGSETPYDVYATDGKSTKGFRIAKNVPKEHYTDAYCIACSILDADTKVSAPAEPFKLKQFRRHDRQSCIRQMVDRKYLLDGKVVATNRHKSIEQKSDSLEEFREAYGDAAVSQLTVRPHSPQYKDMARIMPGAVMDFDGIVGVFKGSSGRNNGTPNYYNSTKGARVLTKRCALLAKNAGMVFIPA

SEQ ID NO: 18893 - protein, 360 aa, unidentified
MLVYVLSKNGQPLMPTHRCGFVRRLLNSQKAKVVRRCPFTIQLQYDTDCKTQPVTLGIDAGSKHIGVSATTESKVLYEADIELRNDIVDLLATRRQMRRARRSRKTRYRKARFDNRKRNDKWLAPSIQHKVNCHLEAVRFVHKLLPISKIIVEVASFDIQKIKNPLITSTDYQNGELLDWKNVREYVLFRDSHICQCCKGKSKDPVLQVHHIESRKTGGNAPNNLITLCKTCHNGYHHGTVKLPAKIKRGMKFNDATFMGIMRWGFYNQLKSLYPDVSLTYGYITKDIRISNGLAKTHFIDARCISGNPLATSDNTVYFLKKRRRHNRQIHKFNILKGGRKKRNQAAYLVKGYRPLDKVN

SEQ ID NO: 18894 - protein, 431 aa, unidentified; identical to SEQ ID NO: 15889

SEQ ID NO: 18895 - protein, 365 aa, unidentified
MYVTSDYKQEIVLGVDAGTKHVGLSATTKSKELYSSEVILRNDIVDLLSTRRELRKARRNRLRYRKPRFDNRVKSERPGWVAPSVKYKIDAHIRVIDNVCSILPISRIVIEVAQFDTQKINNPEISGKEYQEGDQLEFWNTREYVLARDGHKCQYCKGKSKDSILNVHHIESRKTGGDSPSNLITLCETCHKEYHKGNIDLKIRRGKSLRDAAVMGIMKWRLYEELKSRYDRVFMTFGYITKHNRIKYGIEKSHTSDAFVISMNINAKRIERQYLKRLIRRHNRQIHKMKILKGGGKKKNNQAPFEVFGFRLFDKVLYNNKIFFVYGRRKSGNFNIRDFNGENSKDVSRKKFKLIRGKRHPIILK

SEQ ID NO: 18896 - protein, 521 aa, Streptomyces sp.
MTTFSSREKTHRAVLPQRRALESAGADNPGSRDETACGLPTAVSGTGSEHGRGEILPEGIRPAGRHPNPAPAGKGEVREGHPMVFVLDKHHQPLMPCTSARARKLLSQGRAVVHRHTPFVIRLKDRTAAASEVTGVELGIDPGSRFTGIALFRTVGDANETARHGLFAIELAHRGGPISDRLTSRSTLRRARRQRNLRYRAPRFNNRSRPEGWLAPSLRHRVETTTAWVDRIARWAPVRTVHVELAAFDTQAMSAGKSASDAEYRRGTLEGMEVREYLLTKWSRACAYCGATGVPLNIDHIHPRSRGGSDRISNLTLACVPCNERKSNRPVEDFLKKKPARLSKVLQQAQAPLRDAAAMNATRWALVRTLEARHEDVRPSSGGRTRWNRQRTATPKSHTLDALCVGVFESVARHPATIHVVMATGRGTYRRTSPDRYGFPRLSLPRTKQHFGYATGDLVRASVPTGKRQGSHTGRVAVRATGNFNIKTLRGLVQGVHHRHVRLLQRADGYAYATRTEATCA

SEQ ID NO: 18897 - protein, 430 aa, unidentified; identical to SEQ ID NO: 6608

SEQ ID NO: 18898 - protein, 442 aa, unidentified
MVTVQQSTHHLPFGRVFIRRNLFMVYVISQDGKPLMPCSDPIARLLLKQGKAKVKKREPFTIKLTYETTNYTQGLTLGVDTGSGTIGTAVSKDNGDIVYMSEVVVRNDITDKMTQRAKYRRNRRNRKTRYRKARWLNRASSIKKDRFSPTMQSKLHSHVREIEYIQSILPITEMVFETGQFDMQLMKNPSLANPKVRPWGYQKGANYGFENTKAMVLNRDNYTCQCCKGKHKDSKLEVHHIVFRSQGGSDEESNLLTLCHTCHKDLHSGKINPKLSGKVKGNLKYATQMNSIRKQLFRCYPNAIETFGYVTKANRLHLGVAKEHYYDACTIATQGNAFNVKSNLYKKKCVSDGDFQKTKGIRSEEPIVTDKICGFRKFDKVRYFGNDYFIKGRMSTGYAILMDIDGNKIDFSTMPRGYKTPKLSNCKRITARSTVMTQVKVV

SEQ ID NO: 18899 - protein, 470 aa, unidentified
MSVFVVGLNGCRLMPVSERKARLLLKGGKASVYRKVPFTIKLNYKTGSTVQPGYLGIDTGSQHIGVSVVQKDGTVLHKEEIGLRDSMSKRKLLESRASSRRGRRYRKTRYRHPKWKPKTKRIFNEKADRKGRHWKKQKNTFTSKRQAGWLPPSLQSKTDHHIQWIRKLLDLLPEGYRLSIELGRFDPARMKDPEIHGELYQKGPQYDYENVRAYVLARDGYTCRVCKKKGGKLHVHHILYRSRGASDNPKYMAAVCSKCHTTENHLPGGILYQWMQDQKKFTRGLRDATFMNILKKRLRKAFPDAVFTYGNITKADREKLELPKSHGNDATAIALVKTEVKSVKDEEPVIHIQQVRRKKRSLHEETPRKGRKEPNRTASRSDKNTKSVTVTKGSGEKKASMTACLFDRVELDGKKGWITGFTGTSCYVKDKEDNYICTSSKYKQVSISRLRILHHCGNWAIGAEKPLGKG

SEQ ID NO: 18900 - protein, 442 aa, unidentified
MVYVLNKDGQPLMPTNRHGKIRRLLKTNKAKVIKRCPFTIQLLYDTTNHTQDITLGVDAGSKHIGLSATTEDKVLFEADAELRNDISKLLEARYTFRRSRRNRKTRYRKKRFDNRVSSKHKGWLAPSIEHKIQSHFAMVEKVHRILPVTKIVVETASFDTQLLKAQLEGKPIPQGTDYQNGELAGWNIREYIFHRDNYTCQWCKGKSKDPVLVTHHHADWKGDHTNKPSSLITLCNTCNDSKYHKKEANRLWGWEPKITNSYKHAVFMGVMRWTFYNRLKEIYPNVSMTYGYITKNTRIENNLPKAHYVDARCISGHPEAKSNGEYFYYKKVRCHNRQLHKANTLKGGIRKRSQAEYTVKGFRLFDRVEYQNNEYFVFGRRASGFFDIRTLDGQKVNKGSISFKKLKLKETSKTYLIERRMADTGVSLAPLTTEVTSLRQTG

SEQ ID NO: 18901 - protein, 427 aa, Mastigocoleus sp.
MQNHVFVVDQRRQRLDPIHPKRARRLLEKGKAAVLRMYPFTIILKQVITNPTVQSCQIKIDPGSKVTGFALVRGGEVIWGMELEHRGEQIKAKLLDRRSVRRNRRNRKTRYRKPRFLNRKRPEGWLPPSLEHRVKTIETWVIRLMRFAPTDQIIVERVKFDMQKMQNPDISKEEYQQGTLHGYEVREYLLEKWDRKCTYCGVKDVPLQIEHIHPKSKGGSNRVSNLCLACDKCNKKKGNKPVEDFLKNKPTLLAKIKAQAKKPLKDAAAVNATRDAIIKMVKFFDWFHEIKTGTGGQTKYNRTRLNLPKEHWIDAACVGDVDNLILLTKQPLKVRCTGHGTRQMCRTDKHGFPKRHVPRDKFVKGFQTGDIVKAVVTKGKKIGTYFGRVAVRKSGSFNISSKAGLIQGINYKYCNLIHRRDGYSYSF

SEQ ID NO: 18902 - protein, 502 aa, unidentified; identical to SEQ ID NO: 2616

SEQ ID NO: 18903 - protein, 423 aa, unidentified; identical to SEQ ID NO: 4062

SEQ ID NO: 18904 - protein, 489 aa, unidentified
MDMVYVLNKDGKPLMATTRGGRVRYLLKEKKARVVSSTPFTIQLNYDTPDITQDLILGIDPGRTNIGVAVVKEDGQCVFSAHLETRNKDVPLLMKKRAAFRRNHRTLDRRRKRQRRAKAAGTTIADGSAERLLPGYEKPIVCHYIRNKKARFNNRKRPQGWLTPTANHLLQTHINLIAKIAKFLPITKVVVELNRFAFMAMDNPNIRRWEYQQGPLYGLGSVEDAVYAQQDGHCLFCKKPIDHYHHVVPRHKGGSETLANRCGLCERHHALVHKDKAWAEKLVTRKGGMNKKYHALSVLNQIIPHLMEYLGSETPYDVYATDGKSTKGFRIAKNVPKEHYTDAYCIACSILDTNIKVSAPVEPFELKQFRRHDRQSCIRQMVDRKYLLDGKVVATNRHKSIEQKSDSLEEFREAYGDAAVSQLTVKPHPPQYKDMTRIMPGAVMDFNGTIGVMQSSIVGRFYKSTKGYKATPRRCVLLAQNAGMVFLPA

SEQ ID NO: 18905 - protein, 424 aa, unidentified; identical to SEQ ID NO: 18309

SEQ ID NO: 18906 - protein, 427 aa, unidentified; identical to SEQ ID NO: 3660

SEQ ID NO: 18907 - protein, 418 aa, unidentified; identical to SEQ ID NO: 2425

SEQ ID NO: 18908 - protein, 518 aa, unidentified; identical to SEQ ID NO: 7632

SEQ ID NO: 18909 - protein, 470 aa, unidentified; identical to SEQ ID NO: 2825

SEQ ID NO: 18910 - protein, 426 aa, unidentified; identical to SEQ ID NO: 2776

SEQ ID NO: 18911 - protein, 443 aa, unidentified; identical to SEQ ID NO: 4257

SEQ ID NO: 18912 - protein, 470 aa, unidentified; identical to SEQ ID NO: 2825

SEQ ID NO: 18913 - protein, 371 aa, unidentified
MVYVQDINGKPMMPTTRHGKVRRLLKDKKAVVVNLCPFTIKLMYVTSDYKQEIVLGVDAGTKHVGLSATTKSEELYSSEVILRNDIVDLLSTRRELRRTRRNRLRYRKPRFDNRVKSKRPGWVAPSVRYKIDAHIRVIDNVCSILPISRIVIEVAQFDTQKINNPNISGKEYQEGNKLGFWNVREYVLARDGHKCQYCKGKSKSKILNVHHIESRKTGGDSPSNLITLCEICHKEYHKGNIDLKIRRGKSLRDAAVMGIMKWRLYEELKSRYDRVFIERQYLKRLIRRHNRQIHKMKILKGGKKKNNQAPFEVFGFRLFDKVLYNNKIFFVYGRRKSGSFNVRDFNGENSKDVSRKKFKLIRGKRHPIILK

SEQ ID NO: 18914 - protein, 431 aa, Escherichia coli; identical to SEQ ID NO: 4170

SEQ ID NO: 18915 - protein, 513 aa, unidentified
VLEELLSRTEYIYVLGTDGKPQMPTKRKRHILKLLNTGKARIAEKVPFTIQLKYENIPVLQPVTLAEDPGRTNIGVAVLSPLGNLMFAAVIETRNKEIKKLMADRKAHRQASRRGERRARQRLAKKYGTIIKAGMAMRKLPQYAADKFVACKFIRNTEARFCNRKRRPDWLTPTVNHLVQTHLNVIKKISRYLPVTDIAIEVNRFAFMQMENPNASGVDFQTGPLRGFDDVKAAIREQQNGKCLMCKNDIEHFHHMVPLSKGGSDTIQNQVGLCPKCYAKVHTDTSFRKKLGDKKSGLLKKYGALSALNQAIPFICKDLLAEYGKEHVHFCTGKETSLIRTSLGYEKTKDNQMHEVDAYCIGLASLELEDIKSQSFVNTYKIKQFRRQDRSIIHHQTERSYYLDEQKIATNRKPRFEQTGNALSDWYKKQVKACDKAKADKMLSTLKVKKSSRSYNSEGRLMSGAVFSYNGQRHVMSGQLTGGRYLRAYGDTKTNYPVSKCNILRSNEGLVFI

SEQ ID NO: 18916 - protein, 431 aa, unidentified; identical to SEQ ID NO: 4463

SEQ ID NO: 18917 - protein, 413 aa, unidentified; identical to SEQ ID NO: 11197

SEQ ID NO: 18918 - protein, 431 aa, Escherichia sp.; identical to SEQ ID NO: 10059

SEQ ID NO: 18919 - protein, 424 aa, unidentified; identical to SEQ ID NO: 3351

SEQ ID NO: 18920 - protein, 393 aa, unidentified; identical to SEQ ID NO: 5287

SEQ ID NO: 18921 - protein, 465 aa, unidentified; identical to SEQ ID NO: 5709

SEQ ID NO: 18922 - protein, 425 aa, unidentified; identical to SEQ ID NO: 13789

SEQ ID NO: 18923 - protein, 424 aa, Anaerostipes sp.; identical to SEQ ID NO: 3434

SEQ ID NO: 18924 - protein, 406 aa, unidentified; identical to SEQ ID NO: 12874

SEQ ID NO: 18925 - protein, 451 aa, unidentified; identical to SEQ ID NO: 5203

SEQ ID NO: 18926 - protein, 416 aa, unidentified
MVYVLDKNGQPLMPTDRHRKVRLMLQSGQAKVIKRCPFTIQLNYDSGHQTQEISLGIDAGSKHIGVSATTKIKVLYEADVELRNDIVNLLSSRRELRRGRRNRKTRYRQAKFNNRRRGNGWLAPSIRQKIGTHLTVVKNICKILPISRIMVETASFDIQKIKNPDIQGAEYQQGDQLEFWNVREYVLFRDGHTCQCCKGKSKDKILNVHHIGSRKTGGNAPNNLITLCETCHTGYHKGTVQLPKAIKRGIRFKDAAFMGIMRWVFYEALKQQYEPVGTPVHNTYGYITKHTRIAYDLPKEHYVDARCISGNPEASSNGEYYYQKKVRCHNRQIHKLTVLKGGIRKQNQATYLVKGYRLFDKVSYQGKGYFVFGRRQSGFFDIRTLSGEKVNKGSLSCKKLKFIATRTYYLTERRAV

SEQ ID NO: 18927 - protein, 376 aa, unidentified; identical to SEQ ID NO: 16201

SEQ ID NO: 18928 - protein, 425 aa, unidentified; identical to SEQ ID NO: 16091

SEQ ID NO: 18929 - protein, 427 aa, Alistipes sp.
LRVFVRNKRGKPLMPCSPAKARLLLKEKKAIVKRRTPFTIQLTIATGETKQPVSLGVDTGYKHVGLSASTEKAELYASEVELRQDITDLLSARRALRQSRRNRKTRYRAPRFDNRIRTKRKGWLAPSVENRINAHLSRIEAVLRLLPVTKITVETASFDLQLLKNPDISGKEYQEGEQLGFWNIREYVLCRDGHVCQHCYGRSKDPVLNVHHLESRRTGGDSPGNLITLCETCHKALHRGEITLKAKRGQSFRAEAFMGIMRSEVPNRLKASHPELEVNNTYGYRTKHARIANDIAKSHCADAFCIAGNLGAERLGEFFFQKQTRRNNRQIHKLSILKGGIRKRNQAPFEVNGFRLFDKVACQGEEGFIFGRRSSGFFDVRKLDGTRISAGISCKKLHLLEKRRTYLTEIRKEEALPPLPEGRGLRA

SEQ ID NO: 18930 - protein, 442 aa, Moorena sp.
VVSPTSHYNIVKEHITNSEALTMQNYVFVIDTNFQPLNPIPPKKARRLLDKGKAAVFRMYPFTIILKTSVMNPTISPCQLKIDPGSKVTGFALVQNNQVIWGMELEHRGGLIKKKLESRRAVRHRRRNRHTRYRKPRFLNRKRPEGWLPPSLEHRILTIQTWVKRLIKFCPIQEIWVERVKFDTQKMENPEINGVQYQQGELRGYEVREYLLEKWGRECTYCGKQSVPLQIEHIHPKSFGGSNRVSNLCLACEKCNQRKGNKPIEEFLKKKPNLLQKIKNKAKQPLKDAAAVNATRNKLVKVLESIKSVVTGTGAQTKYNRTKFGFPKEHWIDAACVGDIETLVLRTSQPLLVNCKGHGGRQKAALNKYGYPIRHNPLKPIKGWCSGDIAKNLLTGEFGRVNPRSKSNSFNYTIPGEKAISLHVKNLVRVHKKDGYTYGFCQ

SEQ ID NO: 18931 - protein, 376 aa, unidentified
PVSLGVDAGYKHVGLSASTENAELYASEVELRQDITDLLSARRALRQSRRNRNTRYRAPRFDNRIRTKRKGWLAPSVENRINAHLSRIETVIRLLPVTKITVETTSFDMQLLKNSDIAGKKYQEGEQLGFWNVREYVLFRDGHVCQHCHGRSKDPVLNVHHLESRRTGGDSPGNLITLCETCHKALHRGEITLKAKRGPSFRAETFMGIMRWEVLDRLKASHPKLEVQNTYGYRTKHARIVNGIAKSHCADAFCIAGNLGAERLGEFLFQKQTRRNNRQIHKLSILKGGIRKRNQVPFEVKGFRLFDKVACKGEEGFIFGRRSSGYFDVRKLDGTHISAGISYKKLRLLEKRQTYLTEIRKEEALPPLPEGRGLRA

SEQ ID NO: 18932 - protein, 415 aa, unidentified; identical to SEQ ID NO: 3582

SEQ ID NO: 18933 - protein, 529 aa, unidentified
  source 1..529: note = Candidatus Poribacteria bacterium
MIQIMGELAKVRHFMLKIAVVDQNKQVLEPCHPAVARQLLRAGKAAVLKQYPFTIILKRSVVETHTTDYTLSVDPGSQCTGIAITDSENRIVIKIELHHRGKAIKKGLSARAGHRRSRRTRKLRYREPRWRNRARKAPTLTADGWQYKKVDRAVTSKDGKPKQKWHPSQKGWIPPSLMSRVFNIETWVRRLCKVYPITHLAVEHVKFDTQKMANPEIEGVEYQQGTLHGYEVRQYLLEKFNHKCFYCGISNERLEIEHIIPEAKGGTHRVSNLTVSCKPCNREKGDRLPDEIGGTLGKRVEQALKAAGEPMKDAATVNSIRWKISETLEHTGLPLFYGTGGRTKHNRTQADLDKTHYYDAASVNCVPIDDGTHHPVLSIHAVGYGYRADLGDSKIYTSGYMKTVKVKDANNKIVMIERKDRKGKPYKMPKINKEKSVPAPGFRGPQIRIERCAGFARLDMVEIQNRTGRFIGSLNCFDETATGKPQKVRVKVDFTKPDGRTSGNITQIKKIMSRDGYAYTHHKPTPRRR

SEQ ID NO: 18934 - protein, 493 aa, unidentified
MAVVYVISASGKPLMPTTRCGHVRGLLNEGKARVVEREPFTIQLKYETPDVTQPLYLGIDPGRTNVGAAVVCEDGECVFTAQLTTRNKDVPKLMKARKQFRMAHRRLKRRCKRQRRAKAAGTLSQKGEFQRLLPGYEKPILCKGIRNKEARFNNRQRPVGWLTPTANHLLLTHLNMVKKLQKLLPITDVVLEVNRFAFMAMENPSIRRWQYQRGPLYGKDCVEDAVYAQQDGHCLFCGRPIAHYHHVVPQHKNGSDTLENRVGLCNEHHDLVHKDRAWEAKMKETKAGLNKKYHALSVLNQIIPALTEQLTELFPQHAFVTTGKDTADFREDHGIAKEHYLDAYCIACSVLTEPDRVSAPTAKPYRLMQFRRHDRQVCHKENIKRVYLLDGKAVATNRHKAIEQKDDSLEEFRRTHTQQEVSSLTVKDHQPIYKDMQRFMPGGVFLCNGKVHTLLGSQGRYKGMPYYYIGTDGSRNNATRCIFLQQNCGLRWV

SEQ ID NO: 18935 - protein, 413 aa, unidentified; identical to SEQ ID NO: 6473

SEQ ID NO: 18936 - protein, 418 aa, unidentified
MVYVVANDGQPLMPTERHGKVCRMLKSGMAKVVKKCPFTIQLQYESERNVQPVSLGVDAGSKHIGISATTKTKVLYESDVELRDDIVKLLATRRQLRRRRRSRKTRYRPARFDNRRRKEGWLAPSIRQKIESHLTVVANACKILPINQIIVETASFDIQKIKDPEIQGIEYQQGEQMDFWNIREYVLFRDGHTCQCCKGKSKDKVLNVHHIESRKTGGNAPNNLITLCETCHKGYHNGTVTLPKNIKRGMKFKDAAFMGIMRKTLMERLRAELAIQVVETKGYITKYTRVELLKLDKTHTNDALAIAQGRRGFGVEELTTIPQSDYIYRIRPVRHHNRQLHKATILPGGIRKSNQAPRYVRGFRLFDKVSYLGEDCFIWGRRSSGSFLLKLLDGTKVKDGVGYKRISLLERSASYLIS

SEQ ID NO: 18937 - protein, 424 aa, unidentified; identical to SEQ ID NO: 4427

SEQ ID NO: 18938 - protein, 544 aa, unidentified
MKQKKQKVMVYILNKKGKPLMPTTRCGHVRKLLDSKKAVVVNSNPFTIRLKYDTPNGIQDVFAGIDSGRENIGSGASNEDGDCLYLGELKTSNKSIKLKMTERAGFRKERRRHDRQNKQRKARKDHTEIQNGNADICRTTISCKSVQISYPAAEKSVTHKIIRGKEGKFANRHRDEGWITPSARQLVQMHMNDLKSMCKILPISHVTLERVAFDFQKLENENIKVWEYGKGKLYGYDSPEEYIHDVQDGKCLVCGKPHIDYLHHIIPRSKGGSDKVSNIAGLCYDCHYGPMGVHNCQDTQNRLPELKNEANKQYKVSLLNSVMTVLIEEMDKFCKANSIIFSICEGHDTAKVRDMYDLQKDHCFDGFAISLVGRNVESVDVIPDRIYQKQRYKKKSKNIIQKRNCREYYDGKKLVAVNRHKGTDQKADSLEEYMNTYAETHTADECKNQFESLTVKPARRTYTFHKEGRICPFHIGDKVRYEKKNKIKGNTKVDTFICEGIRFVKDENKAEVKHNKTKSKKMKFCRVLESGCTPYVDYRKLALM

SEQ ID NO: 18939 - protein, 436 aa, unidentified
  source 1..436: note = Sutterellaceae bacterium UBA7100
TGRKTEETNLRVFILNKRGKPLMPCSPAKARLLLKEKKAVVVRRTPFTIQLTIATGETKQPVSLGVDAGYKHVGLSASTEKAELYASEVELRQDVSDLLSARRALRQSRRNRKTRYRAPRFDNRIRTKRKGWLAPSVENRINAHLSRIETVLRLLPVTKITVETASFDMQLLKNPDIAEKEYQEGEQLGFWNVREYVLFRDGHVCQYCHGRSKDPVLNVHHLESRRTGGDSPGNLITLCETCHKALHRGEIKLRAKRGQSFRAETFMGIMRWEVLNRLKASHSKLEVNNTYGYLTKHARIKSGITKSHCSDAFCIAGNLGAKRLGEFLFQKQTRRNNRQIHKLSILKGGIRKRNQAPFEINGFRLFDKVACKGEEGFIFGRRSSGSFDVRKLDGTRISAGISYKKLRLLQKRQTYLTEIRKEEALPPLPEGRDLRA

SEQ ID NO: 18940 - protein, 527 aa, unidentified
VLNKDGKPLMPTTRGGHVRHLLKEQKARVVQSNPFTIQLLYKTNDAVQPLYLGIDPGRTNIGVAVVKADGTAVFTAHLKSRNKEIPKLMQDRKRARRARRTNGRRHRRQRRAKANGTISKKCVKQTTAQNGSVSKRAKDIGVIKRRLPGCEKDVLCIGIKNKETKFTNRTRPEGWLTPTANQLLQTHINLVKKIQKFLPISDVVLEVNKFAFMRLNNPNIQKWQYQQGPLYKKESLESAVSEIQEHHCLFCKKPIDHYHHVVPKSENGSNTIANIVGLCAEHHNLVHKDVAWQEKLAEEKTGLNKKYGALSVLNQIIPALTNKLSVLFPKHFFVTAGKSTHDYRAAHGVSKDHWLDAYCIACSVLPSNVCDSNINNHVPYELKQFRRHDRRVLHKANMSRVYTLNGKAVATNRHKAIKQTTDSLEEFRQNYPDDVYKLKVKEHHPAYRNLNRNYPGSVFLVGKQAHVMQGIASSKDGKTTKYNDTNATTITAGKCKFVAKNSGILFVQCKFRKALSDGTTKKLQYPV

SEQ ID NO: 18941 - protein, 393 aa, unidentified; identical to SEQ ID NO: 5287

SEQ ID NO: 18942 - protein, 450 aa, unidentified; identical to SEQ ID NO: 2935

SEQ ID NO: 18943 - protein, 482 aa, Sutterella sp.; identical to SEQ ID NO: 3624

SEQ ID NO: 18944 - protein, 446 aa, unidentified; identical to SEQ ID NO: 16792

SEQ ID NO: 18945 - protein, 512 aa, unidentified; identical to SEQ ID NO: 5811

SEQ ID NO: 18946 - protein, 414 aa, unidentified
MVYVINKQGQALMPTERFGKVRRLLKNSLAHVVCRIPFTIQLDYDTTDYTQPVSLGVDAGSKHIGISATTSEKELYAADVELRNDIVDKLSTRRELRRTRRSRLRYRKARFNNRVSSKRKGWLAPSVENKIQTHLTVVEKINKFLPITNIVVEIASFDIQKINNPIISGSEYQQGEQLDFFNVREYVLFRDNHICQHCKGKSKDKVLNVHHIESRKAGGDSPNNLITLCETCHKAYHRGEFELNVKRGKSFRDSAFMGIMRWSFYDRLKNIYPNVSMTFGYITKNTRITNNLPKDHYVDARCISGNPTAKPLGYYFYQKKVRCQNRQIHKANFLKGGRKKLNQAPFLVKGFRLFDLVEYQKELYYIFGRRSSGSFYIRKLDGTKVNKGSINCKYLRLIATRKSILTEKRMQVNL

SEQ ID NO: 18947 - protein, 424 aa, unidentified; identical to SEQ ID NO: 3232

SEQ ID NO: 18948 - protein, 519 aa, unidentified; identical to SEQ ID NO: 17739

SEQ ID NO: 18949 - protein, 430 aa, unidentified; identical to SEQ ID NO: 8226

SEQ ID NO: 18950 - protein, 430 aa, unidentified
MPKVYVLNRHGRPLMPCTPAKARHLLDAGKAKVRHRTPFTIQLLYGSTGYTQEVILGVDAGSKTIGLSAATETEELFSAEVKPRNDVVELMPARRQFRCARRNRTTRYRKPRFDNRVRSKHKGWLAPSVEVKIQEHMTAIRRACAILPVSKVVVETAEFDLQLLKAVAEGKPVPQGEDYQKGEMYGHYNVRQYVLWRDSYTCRICGMHGSVRKGVPLHVHHLESRRVGGDAPDNLVTLCTACHDKLHKGIIMAADIKKRKRRSTRDATFMGIMRMTLLRRLREQLPVPVVETRGYITKATRENLLVLPKSHTNDALAIAHGPQGFRAEYLPNIRQADRLYTIRPVRHHNRQLHKATILKGGVRKANQAEKYICGFRLYDKVLYNGIECFVWGRRTSGSFLLRQLNGEKVKDGVSYKHLKLLERSQSYLVA

SEQ ID NO: 18951 - protein, 414 aa, unidentified
MPCSPAKARLLLKEKKAIVKRRTPFTIQLTIATGESKQPVTLGVDAGYKHVGLSASTEKAELYASEVELRQDVSDLLSARRALRQSRCNRKTRYRAPRFNNRLRTKRKGWLAPSVENRINAHLSRIEAVLRLLPVTKITVETASFDMQLLKNPDIAGKEYQEGEQLGFWNVREYVLFRDGHVCQHCYGRSKDPVLNVHHLESRRTGGDSPGNLITLCETCHKALHRGDITLKAKRGKSFRAEAFMGIMRWEVLNRLKASHPELEVHNTYGYRTKHTRIVNGIDKSHCADAFCIAGNLGAKRLGEFFFQKQTRRNNRQIHKLSILKGGIRKRNQAPFEINGFRLFDKVACKGEEGFIFGRRSSGSFDVRKLDGTRISAGISCKKLHLLEKRRTYLTEIRKEEALPSLREGRGLRA

SEQ ID NO: 18952 - protein, 512 aa, unidentified; identical to SEQ ID NO: 5238

SEQ ID NO: 18953 - protein, 435 aa, unidentified
  REGION 1..435: note = IscB polypeptide
MVYVISKDGKPLMPTERYGKVRKLLKQKLAKVVRLRPFTIQLQYVTTTYTQPVSLGIDSGYTYVGYSVTTDKKELMCGVLTLLGSISERISKKRMYRQLRRSRLRYRKCRFNNRKKPQGWFPPSIQHKADSHIKFIELLKSILPITRTTIEVAAFDIQKIKDPNISGLDYQNGEQKGFYNLREYILYRDNYTCQLCGKKNVALRVHHIGYWKGDQTNKPSNLITLCNNCASAKNHLPNGKLYGWEPKLKPFKEETFMSILRKRLANTLNCNFTYGYLTKTRRIELNLEKTHYNDAFCIAGGTENHTRIEPINFGQTRRNNRSLETFYDAKYIDIRTGKSVKGVELFNGRTTRNKNLNSEDLHKYRGKKLSKGRRQIRRKRYPYQHNDLVKFNGKVYIVNGTSNYGTYILLQGLSKAVRTNLIQPYKFSKGMYAYR

SEQ ID NO: 18954 - protein, 426 aa, unidentified; identical to SEQ ID NO: 7027

SEQ ID NO: 18955 - protein, 469 aa, Streptomyces sp.; identical to SEQ ID NO: 4670

SEQ ID NO: 18956 - protein, 463 aa, unidentified
MAVFVMDRSGRPLMPCTEKRARLLLARGRARVHKVMPFTIRVVDRLVEDCEFQALRIKLDPGSKTTGMALVRETAQNGVVIINLFELMHRGQQISEALTARRGHRRLRRGKLRYRAPRFLNRGNKGKGWLAPSLQHRVDTTLAWVNRIQRYAPVSAISTELVRFDMQALENPDIEGAQYQQGTLAGYEVREYLLEKWSRTCAYCGVKNVPLQIEHIHPKSKSGSDRISNLTLACQCCNQKKGVLPIKVFLAKQPERLKRIQAQAKRPLKDAAAVNATRWALVNALKATGLAVETASGGKTKFNRSQLGIPKTHALDAACVGHVHAMTGWQKPTLCIKATGRGSYQRTRLDKFGCVRGYLTRSKSIQGFQTGDMVKAIVTKGKKAGCHIGRVAVRASGSFNIQTRHGLVQGVSHRYCTVVQRGDGYGYQLVAKTDATGTPPKQGDALHPALYLPGLKAEVLRVN

SEQ ID NO: 18957 - protein, 397 aa, unidentified
VTTILKTCFAASNLAKIVVLMDAWDIIVILNKRGKPLMPCSPAKARLLLKEKKAIVVRRTPFTIQLTIATGEAKQPVSLGIDAGYKHVGLSASTEKAELYASEVELRQDITDLLSARRALRQSRRNRKTRYRAPRFNNRLCTKRKGWLAPSVENRINAHLSRIKAVLRLLPVTKITVETASFDLQLLKNPDISGKEYQEGEQLGFWNIREYVLCRDRHVCQHCYGRSKDPVLNVHHLESRRTGGDSPGNLITLCETCHKALHRGEITLKAKRGQSFRAEAFMGIMRWEVHNRLRALHPGIEVSNTYGYRTKHARIANGIAKSHCADAFCIAGNLGAERLCEFFFQKQTRRNHRQIHKLSILKGGIRKRNQAPFEVKGFRLFDKVACQGEEGFIFGRR

SEQ ID NO: 18958 - protein, 406 aa, unidentified; identical to SEQ ID NO: 2752

SEQ ID NO: 18959 - protein, 417 aa, unidentified
MPCSPAKARLLLKEKKAIVKRRTPFTIQLTIATGEAKQPVTLGVDSGYKHIGLSATTEKAELYASQVELRQDITDLLSARLALRRSRRSRKTRYRAPRFDNRVASKRKGRLAPSVENRIAAHMSRVEAVMRVLPVTAITVETAAFDTQLLKNPDIAGAAYQQGEQLGFWNVREYVLFRDGYVCQHCRGKSKDPILNVHHIESRRTGGDAPNNLITLCETCHKAFHRGEIKLKVKRGKSFKAETFMGIMRWTLLERLKKAHPELSVRNTYGYLTKHKRISHGIAKSHCADAYCIADNLGAKRLEGFFFQKQTRKHNRQIHKLSILKGGLRKKNQAPYEVKGFRLFDKVICKGEEAFIFGRRTSGSFDVRRLDGTRISAGISYKKLRLLEPRTTYLTEFRKEAALPPLHKCRGFRAEFL

SEQ ID NO: 18960 - protein, 451 aa, Scytonema sp.; identical to SEQ ID NO: 2763

SEQ ID NO: 18961 - protein, 431 aa, unidentified
MPNKVYVINKHGRPLMPCSPAKARHLLDEGKAKVKKRTPFTIRLVYGSSGYTQEVILGVDAGSKTIGMSASTTKEELLSAEVKPRNDVVDLQSTRREFRRARRNRKTRYRKPRFDNRVRSKHKGWLAPSVEVKIQEHITAIRRVCGILPVSKVVVETAEFDLHLLKAIADGKPVPQGEDYQKGEMYGHYNVRQYVLWRDGYTCQCCGAHATKKKEVRLHVHHLESRKVGGDAPDNQVTLCESCHEKLHKGLIAEKDFKKRKRRSTRDATFMGIMRKTLMQRLCSELPIPVVKTRGYITKATREKLLVLPKSHTNDALAIAQGKRGFNVGYLPEIAQIDKIYTIRPVRHHNRQLHKATILKGGIRKSNQTEKYVFGYRLFDKVQFNGQDCFIWGRRTTGIFTIKTINGKMIKDGISFKKLKPVEKSTGYLIA

SEQ ID NO: 18962 - protein, 356 aa, unidentified
KDVLCIGIKNKEAKYTNRARLEGWLTPTANQLLQTHINLVKKIQKFLPISDAVLEVNKFAFMRLDNPNIQKWQYQQGPLYQKGSLENAVSEMQEHHCLFCEKPIEHYHHVVPKSENGSNTIANIVGLCAEHHNLVHKDVAWQEKLVEEKTGLNKKYGALSVLNQIIPALTKELSFLFPKHSFMTNGKSTHDYRAAHGISKDHWLDAYCIACSVLPIDVCDSTINNCVPYELKQFRRHDRRALNNENMNRVYTLNDKVVATNRHKATEQEAASLEEFRKEHPNDVCKLKVKEHHPTYRNMNRNYPGSVFLVGKQIHVMQGIASSKDGKATKYNDTRATTIAAGKCKFVAKNSGILFV

SEQ ID NO: 18963 - protein, 421 aa, unidentified
MRGRPLMPCSPAKARHLLKAGKAVVRRRTPFTIQLRIATGETKQSVTLGVDAGAKHVGLSAATEKEEVFASEVELRQDITGLLAARLSLRRERRQRKTRYRAPRFLNRVRSKHNGWLPPSVENRIQAHLSRIDAICGLLPVTKIVIETASFDIQKIKHPDVEGTDYQQGDQLGFWNVREYVLFRDGHVCQHCHGHAKDKILNVHHLESRQTGGDAPNNLITLCETCHKACHAGKIKLKVKRGQSFREEAFIGIMRWTLLDRVRKAHPGLPVENTYGYLTKNTRITLGLPKAHCVDAYCIAGNLKAVRRGVYLHQRQVRKHNRQIHKCTVLSKTLKDGTKIGYRKLNQTPHLVKNFRLFDKVRCLGQTGFIFGRRSSGYFDVRRLDGVKLSSGISYRKLTLLEKRSTYLTELRKEDGASSPV

SEQ ID NO: 18964 - protein, 499 aa, unidentified
MRYVYVLDQEGRPLMPTSRFRKVRRMLKTGQARAVSTLPFTIQLTYRPKTQERQAVVAGIDPGRTNIGLAAVREDGICLYQAHGTTRNKEIVNLMSDRLASRRASRRGERLARKRLAKRLHTTAKKLLDRILPGYREPLAVKDIINTEARFNNRLRPQGWLTPSATQLLRTHVNLLKKMQEILPVSDVVVELNRFAFLQLDQPGVRKKDIDFAHGALYGTGGLHAAVRELQQDRCLLCREGEIEHFHHIIPRSRRGSDTLANLAGLCERCHELVHKHAEAADRLRERKNGLEKRYGGTSVLNQIIPTLMQNLGECFPGHAFATTGWKTKEFREAHELEKDHAVDAYSIAGSILQPSVLDLAVEGYEILQFRRHSRANINHQTERTYLLDNKTVAKNRHKRMDQKTDSLQEWYEDAAARYGEKQADRLRSRLTVKKSTRYYNSKDRLLPGTIFSYEGKRYVLTGQLTGGAYYRAYGQGKKNFPAKKVRILCQNEGLVYAS

SEQ ID NO: 18965 - protein, 419 aa, unidentified; identical to SEQ ID NO: 4877

SEQ ID NO: 18966 - protein, 432 aa, unidentified
MQRVLVIDRHKQPLMPCHPARARELLRDGKAAVYRRFPFTVILTDRENGDVQSVAFKVDPGSKQTGIALVADFKRGKRVIWAAVLEHRGRQIKDALESRRALRRSRRNRHTRYRAPMFDNRRRPSGWLPPSLQSRVENVLTWLCRLNRACPLDSVSQELVRFDTQLLQNAEISGVEYQQGELVGYEVREYLLEKWQRTCAYCGAKDMPLEIEHITPKTRGGSNRVSNLTLACHHCNQKKGTQTAAEFGFPEVQKRAKQPLKDATAVNASRWALYHRLKTTGLPVEIGTGGRTKSNRTQQAYPKAHWIDAACVGESGDRVHIVPDHIALHIKATGHGSRQMCRTDAYGFPIRYRLPQKRHFDFQTGDMVKANVLSGKYSGRHIGRVACRATGSFDIKTDYGKVTVNHKTCQIIHRSDGYTYYRKEEQRLPPQP

SEQ ID NO: 18967 - protein, 436 aa, unidentified
MTRTLTTQTTQACVLDRQGKPLMPTTRLGKVYRLLKTQKAHIVSYEPFTIQLDYQPDTQVIQPMTLGVDSGAIHSGYSVANEHREYYSAEVVARNDISNRLSDRRMYRQNRRSRKTRYRKPRYSNRKNKKKGWLPPSLEQKVAVQVNEIDHIPRYFPIETIIVETAEFDIQKIKNPDIYGIEYQQGTLQGYNIRNYLLEKHGRKCFYCGKAVSGFEVEHMLPKSKGGSNRIDNLTLSCHDCNETKGTLTAEEFIQQTLSAKKAASKLKQLPNEKRLFKYMAYMNATRWALYDAIKERYPNVKMTYGYITKYNRIQAGLPKAHHIDAKCITGFPTVPSMSQTVVKVKMRRHNRQLHRATFSKGHVRKAASLPTTVFGFQLYDLVCFNNRRYYIKGRRSSGVFALVSVGGLKDENRNYKKLTLLAHTNAYLTNHYVNA

SEQ ID NO: 18968 - protein, 427 aa, Enterococcus sp.; identical to SEQ ID NO: 5630

SEQ ID NO: 18969 - protein, 461 aa, Parasutterella sp.; identical to SEQ ID NO: 3646

SEQ ID NO: 18970 - protein, 414 aa, unidentified
MPCSPAKARLLLKEKKAIVKRRTPFTIQLTIATGESKQPVSLGVDAGYKHVGLSASTEKAELYASEVELRQDITDLLSARRALRQSRRNRKTRYRAPRFNNRIRTKRKGWLAPSVENRINAHLSRIEAVLRLLPVTKITVETASFDMQLLKNPDIAGKEYQEGEQLGFWNVREYVLFRDGHVCQHCHGRSKDPVLNVHHLESRRTGGDSPGNLITLCETCHKALHRGEIKLKAKRGRSFRAETFMGIMRWGVLNRLKASHPKLEVHNTYGYRTKHARIANGIAKSHCADAFCIAGNFGAKRLGEFFFQKQTRRNNRQIHKLSILKGGIRKRNQAPFEVNGFRLFDKVACQGEEGFIFGRRSSGYFDVRKLDGTRISASISCKKLRLLEKRRTYLTEIRKEEALPSLSEGRGLRA

SEQ ID NO: 18971 - protein, 461 aa, Parasutterella sp.; identical to SEQ ID NO: 3646

SEQ ID NO: 18972 - protein, 442 aa, unidentified; identical to SEQ ID NO: 16323

SEQ ID NO: 18973 - protein, 578 aa, unidentified
MVYVYVLDKHGKPLMPTTRCGHVRKLLKNGKAVVVSTTPFTIRLKYESTHFTQPVHEGIDTGRENIGDAASLEDGRNVFLADVRTNNKSIKKKMTERAGFRRERRRHRRIRKQRRAMHDKTTMQKGKADTVRTKRACQSVEISYPKMEKAVTHKVIRGKESKFANRRRPEGWITPSARQVIQITLNEIKQTAKILPVTDISLERVAFDFQKLENTNIRKWQYGKGPLYGYKSYKDYIWDEQHGKCACCGKPIEEYHHIHHRADGGIDNVKNIIGLCHHCHEEIHNSKEAEERLAELKQGVMQKYYVGLLNSVMPALIDAVRTYCKEHGLTLTITDGQQTSETRKKYGLEKDHCIDAYAISLAERDVSTVRPADTIYMKRRFKKKTKAFIAARNQRVYKLDGKAVAYNRHKALNQKTDSLEEYLSQYKASHSAKDVQCLMHRMKIEPARRTYTYRKQGLVAPVRPGDLVLYRKVRKVKGDVKTEVFPAVSVEYTEIAKKANGVVTKERVWKIGVDDTHIRKAKFCSVLNHSCVQFTGSESTSAYLKKVAEEAAERKKKAAKKAAEHKTKAAEGAAKASA

SEQ ID NO: 18974 - protein, 444 aa, unidentified
KKRKDSRRARRTNGRRCRRQRRAKANGTISKKCVKQTTAQNGSVSKRAKEIGVIKRHLPGCEKDVLCIGIKNKEAKFSNRTKSEGWLTPTANQLLQTHINLVKKIRKFLPISDVVLEINKFAFMQLDNPNVQKWQYQQGPLYQKANLEEAVSEMQEHHCLFCKKPIAHYHHVVPQSENGSNTIGNIVGLCTKHHDLVHKDTAWQKKLAKKKTGLNKKYGALSVLNQIIPALTKELGSLFPKHFFATNGKSTYDYRAAHGVRKDHWLDAYCIACSVLPNDVCDKNINSRVLYELKQFRRHDRRALNNENMSRVYTLNENVVATNRHKATKQTTDSLEEFRQNHPDDACKLKVKEHHPTYRNMSRNYPGSVFLVGNQVHVMQGVAGSKDGKATTYKDTNANSIAAGKCKFVAKNSGILFVYYKLKVVKPRKIFNNLCLAKSLNFWR

SEQ ID NO: 18975 - protein, 430 aa, unidentified; identical to SEQ ID NO: 4817

SEQ ID NO: 18976 - protein, 434 aa, unidentified
LSGELLSAAVVQTRNKEIVKLMEKRKQHRRASRNGERKARQRLAKKCHTMLKVGSLMRKLPMYGKDKRVKCLVIRNTEARFCNRKRKDGWLTPSAEHLVRTHINLIHKMQKFLPITDVAIEINRFAFLSLEDPSVSGVDFQKGPLKGYDNLNAAVEDLQDGHCLMCDRPIEHRHHIVPRSMQGSNTIENIAGLCCKCHEKVHKNAAFEKRLKKKKAGLDKRYAAISVLNQAIPFICKQLEQEFGKEHVHYCSGKDTAMVRRSFGYHKTKEEQLHEVDAWCIAVLSLQQIPEKAPEFDHVYKIMQFRRQDRSRIKAQTSRTYYYDGKKVAKNRKKAEGQKEDSLQEWRECHVTLYGEEQARKMISQLKVRKSIRRYNRLDRLMPGAVFYYKGTRYVMRGQHNKGQYLQAVGMGSKDFPVKDCKIVAQNEGLVFVS

SEQ ID NO: 18977 - protein, 420 aa, unidentified; identical to SEQ ID NO: 6017

SEQ ID NO: 18978 - protein, 570 aa, unidentified
MTNDYVFVVDRKGNPLMPTKRRGRVRHLLKEGKAVVIKTHPFTVKMKYDAGHYTQPMYEGIDSGRQNIGNAVSRENGENVLLEDVRTNNKSIKKNLMKRKAHRQERRRNNRHSRQRKAIHDGTEIKNGDDDKWHTDKDCKSVKVSYPAADNAVTHKVIRGKEGKFANRKRPDGWITPSARQIVQLTLNMVKETCSIMPIRRISFERVAFDFQKLANQNIHAWEYGKGPLYGFKTYKDYIYSEQQGKCPFCGKPITQYHHIIPRSAGGIDNVKNIIGLCDEHHTMVHNDVAFAETLSDAKAGVEQEYYAGLLNSAVPALIEALSVYCKEKGIELLITDGRTTRETRVKYGFDDKKDHCIDAYAISLADRNVKNISFAGHIIMKRRYKKKSKNIISARNQRIYELDGQVIACNRHKAENQKENSLEEFLTQYRETHTEKEVQQMMHHIRILPAVRSYTFHKDGLKAICHPGDIVEYKKLNKTSGKMKRNIFVCTSVNFDGKDKHGDYCAAENHIGYDNGKGNGNRKAKFCTVLDSSCLQCTGIERTDDYIAQLKADPSKKKGNKNLWLTNVY

SEQ ID NO: 18979 - protein, 288 aa, unidentified
LQFYRKEHSIMQYVYVLNKHGEPLMPCSPGKARLLLKHQKACVVKRTPFTIKLLYGSAGYKQPITLGVDAGSKHVGLSASTEKRELYSEEFTPRNDVVELLSTRRQNRRSRRNRKTRYRAPRFNNRIHSKHKGWLAPSVEVKIQEHITVIKRICRILPITLVRVETAEFDTQRLKAMLAGKPLPVGTDYQLGEMYDEYNVRQYVLKRDHYTCQCCGAHNTAEKVVKLHVHHLESRKTGGNAPSNLVTLCTTCHKNLHKGKVTLDGKERDKPLRDAAFMGIMRKTLMAR

SEQ ID NO: 18980 - protein, 524 aa, unidentified; identical to SEQ ID NO: 10783
  source 1..524: note = SAR202 cluster bacterium bin 87

SEQ ID NO: 18981 - protein, 442 aa, unidentified; identical to SEQ ID NO: 2903

SEQ ID NO: 18982 - protein, 455 aa, unidentified
  REGION 1..455: note = IscB polypeptide
MQKLSVKLKNTPRNTPLVPCSVSSVLNRAERLSVQNKVLTDNNSEVDLRLPAGGPKAITPVFVLSRDGSPLMPCKPAKARHLVRDRRAKVIRRSPFTIQLLWDCEKNIQSVTLGIDPGYKNIGFSAVTDQKELISGEVKLRSNMSKKLADRSMYRRGRRIRFWYREPRFNNRVASKKKGWLAPSIRHKLDSHIKLVKQIKELLPISSVVVEVANFNIQKIKNPEVKGIEYQRGEQLGFWNVREYVLHRDNHTCQKCKGKSGDKILQVHHIKGKKEGATDRPEELITVCKTCHRRHHKGIDIIPIKEIKNFKPETFMSTIRWKLVDILKSEYTYGYITKHNRIGLGLAKSHSNDAFCIANGNEQLRVRSFSVVQKKKNNRRLQVDRKGYKPGIRRQRYPYQPYDLVKVQGNVFTSKGTSCYGTCILLKNQLDGVKSISTKKLDDWHISAKTLVWTN

SEQ ID NO: 18983 - protein, 419 aa, unidentified; identical to SEQ ID NO: 6954

SEQ ID NO: 18984 - protein, 431 aa, unidentified
MPNKVYVINKHGRPLMPCSPAKARHLLDEGKAKIKKRTPFTIQLVYGSSGYTQEVILGVDAGSKTIGMSTSTKKEEVFAADVTPRNDVVDLLSTRREFRRARRNRKTRYRKPRFNNRVRSKHKGWLAPSVEVKIQEHITSIKMVCRILPVSKVVVETAEFDLQLLKAIADGKSVPQGEDYQKGEMYGHYNVRQYVLWRDNYTCQCCGAHATKKKEVRLHVHHLESRKVGGDAPSNLITLCDSCHEKFHKGIITAANLKKRKRRSMRDATFMGIMRKTLIQRLRAELTIPVAETRGYITKATREKLLVLPKSHINDALAIAQGKHGFNVGYLPEIAQIDKIYTIRPVRHHNRQLHKATILKGGIRKSNQAEKYVFGYRLFDKVQFNGQDCFIWGRRTTGIFTIKTINGKMIKDGISFKKLKPVEKSTSYLIA

SEQ ID NO: 18985 - protein, 456 aa, Nitrincola sp.; identical to SEQ ID NO: 11949

SEQ ID NO: 18986 - protein, 456 aa, unidentified; identical to SEQ ID NO: 6138

SEQ ID NO: 18987 - protein, 418 aa, unidentified
MVYVLGQDGHPLMPTCRHGKVKRMLKSGMAKVVKKCPFTIQLQYESTTHTQKINLGIDAGSKTIGVSATTESKVLYESEVVLRNDIVELLSGRRALRRSRRNRKTRYRKPRFDNRRRPDGWLTPSIRQKIKTHVTVVENVMKILPVTKIIVETASFDIQKIKNPKIEGAEYQYGEQLDFWNVREYVLFRDGHTCQCCKGKSKDNILNVHHIESRKTGGNAPNNLITLCETCHKAYHKGVITLPKEIHRGMRFRDAAFMGIMRWAFYDRLKELYTPFGVEVINTYGYITKNTRIEHGLPKEHYVDARCISGNPAAKPLGHYYFQKKVRCHNRQIHKNTILKGGIRKRNQAAYLVNGYRLFDKVKYQNQEYFIFGRRSSGFFDIRTLDGTKVNKGSISCKKLQLVEKSKHYLTEQRKVTA

SEQ ID NO: 18988 - protein, 374 aa, unidentified
LNYDSGHQTQEISLGIDAGSKHIGVSATTKIKVLYEADVELRNDIVDLLSSRRELRRGRRNRKTRYRQAKFNNRRLGNGWLPPSIRQKIGTHLTVVENICKILPISRIMVETASFDIQKIKNTDIQGAEYQQGDQLGFWNIREYVLFRDNHTCQCCKGKSKDKILNVHHIESRKTGGNAPNNLITLCEICHTGYHKGAVQLPKTVKRGMRFKDAAFKGIMRWAFYEALKQQYEPVALVHNTYGYITKHTRIEHNLPKEHYVDARCISGNPDAFPSGEYYYQKKVRCHNRQIHKLTILKGGIRKQNQATYLVKGYRLFDKVSYQGKGYFVFGRRQSGFFDIRTLSGEKVNKGSLSCKKLKFIATRTYYLTERRAV

SEQ ID NO: 18989 - protein, 279 aa, unidentified; identical to SEQ ID NO: 5082

SEQ ID NO: 18990 - protein, 453 aa, unidentified
MLMAVAVVSRTGVPLMPTSPYRARKLLASGKAEKYGYDPFTIRLTERETGDTQPVELCMDTGYIHIGVSVKSEKHEYLALQIDTLTDEKKKHEKCREKRRNRRSRKRYRKPRFDNRKRDKGWLAPSLEHKKEIHVRAAERICRVIPVTDITMEMGNFDTQALKAREEGRPLPQGTDYQQGERYGTATLREAVFSRDNYTCLCCGRTMKDGAYFHVHHIQYRSQGGTDRMANLATVCEKCHTPANHQPGGKLYNWKPEIKSFKGATFMTAVRWQMYREIKEKIPDVSIHLTYGAATKERRRALDIEKSHVNDAFVMGCFHPNHRARPELYIKKRRNNRILESFYDARYIDSRDGKKKPGKELFNGRISRNHKKDSENLHKYRLRKVSKGKRSIRKKHYPIQPHDILVYCGRKYETAGCHNLGTGAILLPERRSIAVSKLKIYRYSGGYYKAEFN

SEQ ID NO: 18991 - protein, 545 aa, unidentified
VQFAWWLCHPKPSDNIEDVNHETALMLLRIKAGTETFGTAPCGSGPKAEGVSHERKSMNIVSVVTNTNKPLMPTSPYRARKLLSSGKAKIVKHRPFTILLVNRSDGNVQEIEYKSDTGYLHVGISVCSEKREFVREQRDLLPDEREKHNDRRKYRRTRRNRKRYRKARFDNRIGKIRKKEKNKHVWLPPSLDHKVDAQVQLFLRLYQVMPIKRAVFEMGQFDPALMKALEKGEAAPQGIDYQMGERYQIATRRAAVFTRDRYACVFCGRSIKDHAILHVHHIGFWKQDRSNRLDNLATCCEQCHTSENHRPGGILYGVEPKLESLASATYMNVVRFELLQRLKEAAPDVEFHISYGAKTSVIRKQRSISKSHTNDAYCLGQYFPKLRAEEIGFQKIRRNDRILQKFYDAEYLDSRDGTTKKGKELTNGRISRNHMKDHKNLHQYRGKKLSKGRVTIRRGRSSLKTGSLVRFDGEVLTVHGTHRSRKKNKAGHIKVSVNVEFECPSKTGRKSAALSKCQIISRSYNTGWKQIQLRKEEQGRIAAVV

SEQ ID NO: 18992 - protein, 417 aa, unidentified
MPCSPAKARLLLKEKKAIVKRRTPFTIQLTIATGEAKQPVTLGVDSGYKHIGLSATTEKAELYASQVELRQDITDLLSARLALRRSRRSRKTRYRAPRFDNRVASKRKGRLAPSVENRIAAHMSRVEAVMRVLPVTAITVETAAFDTQLLKNPDIAGAAYQQGEQLGFWNVREYVLFRDGHVCQHCRGKSKDPILNVHHIESRRTGGDAPNNLITLCETCHKAFHRGEIKLKVRRGKSFKAETFMGIMRWTLLERLKKAHPELRVRNTYGYLTKHKRISHGIAKSHCADAYCIADNLGAKRLEGFFFQKQTRKHNRQIHKLSILKGGLRKKNQAPYEVKGFRLFDKVICKGEEAFIFGRRTSGSFDVRRLDGTRISAGISYKKLRLLEPRTTYLTEFRKEAALPPLHKCRGFRAEFL

SEQ ID NO: 18993 - protein, 444 aa, unidentified
MSVLVIGRNGRALMPTNPRKARLLLKKKTASVVCRHPFTIQLLYKTGCATQEGCIGIDTGSQHIGVGITCGDRVILKDEHALRSSMEKRSLLATRAVMRRGRRYRKVRYRKPKWRHHTKRMYFEKANRRGQHWRKVKTTTQSPRLKGWLPPSLQSKCDHHFRIIDRYLKYLPDPITRNLVIEAGRFDMARMNDPTIHGEMYQRGPMYDAENLRAYIFARDNYQCVCCKAKAGTTRKADGTTVKLVAHHILFRSRGATDNPKYIISVCDHCHTTKAHQPGGILYSWMENNKKVARGLRDATFMNILRKRLFARYPQAAFTYGNITAADRKQLRLPKSHANDAVAISLFGKEASTVKNICQTMHYKQIRKSKRSLHEAIPRKGRKNPNTKAVRNKKNTTQVNGFKLWDSVLADGKKLFICSFTGTSAYLIDKNGCYISQPGKTYKQ

SEQ ID NO: 18994 - protein, 552 aa, Streptomyces sp.; identical to SEQ ID NO: 8417

SEQ ID NO: 18995 - protein, 430 aa, unidentified; identical to SEQ ID NO: 6597

SEQ ID NO: 18996 - protein, 408 aa, unidentified; identical to SEQ ID NO: 8687

SEQ ID NO: 18997 - protein, 408 aa, unidentified
MVYVQDIDGKPMMPTTRHGKVRQLLKDNKAVVVNTCPFTIKLTYKTSDYKQEIVLGVDAGTKHVGLSATTKSKELYSSEVILRSDIVDLLSTRRELRRTRRNRLRYRKPRFDNRIKSKRTGWVAPSVRHRIDAHIRVIDNVCSILPISRIIVEVAQFDTQKIKNPNISGNEYQEGNQLGFWNVREYVLTRDGHKCQHCKGKSKDPILNVHHIESRKTGGDSPSNLITLCETCHKEYHKGKIDLRVKRGKSLRDAAVMGIMKWKLYEELRSRYDNVSMTFGYITKYNRIKYGIEKSHISDAFVISKNFNALRLGYHYKVRLVRRHNRQIHKQKVLKGGVKKPNQSSFEVFGFRLFDRVMFEGNCYFIFGRRKSGSFNIRDIDGGNQRDITYKKLKLLRCKRFMIQKETN

SEQ ID NO: 18998 - protein, 424 aa, unidentified; identical to SEQ ID NO: 5075

SEQ ID NO: 18999 - protein, 512 aa, unidentified
MSTVYVLNKDGKPLMPTTRGGHVRHLLKEQKARVVRAKPFTIQLLYETNDVVQPLYLGIDPGRTNIGVAVVKANGTAVFTAHLETRNKEVPKLMQDRKKARRARRTNGRRCRRQRRAKANGTISKKCVKQDTAQSKNPSKRAKEIGIIKRRLPGYKKDVLCIGIKNKEAKYTNRTRPEGWLTPTANQLLQTHINLVRKMQKFLPISDVVLEVNKFAFMRLDNPNIQKWQYQQGPLYKKESLESAVSEIQEHHCLFCKKPIDHYHHVVPQHKNGSNTIGNIVGLCAKHHDLVHKDSAWEKKLAKKSTGLYKKYGALSVLNQIIPALTNKLSVLFPKHFFVTAGKSTHDYRAAHGVSKDHWLDAYCIACSVLPSNVCDSNINNHMPYVLKQFRRHDRRVLNNENMNRVYTLNNKAVAINRHKAKDQKTVSLEEFRKEHPDDVCKLKVKEHHPTYRNMNRNFPGSVFLVGKQIHVMQGIASSKDGKATKYNDTSATAIAAGKCKFVAKNTGILFV

SEQ ID NO: 19000 - protein, 420 aa, unidentified; identical to SEQ ID NO: 8221

SEQ ID NO: 19001 - protein, 438 aa, Thermoanaerobacter sp.; identical to SEQ ID NO: 8125

SEQ ID NO: 19002 - protein, 418 aa, unidentified; identical to SEQ ID NO: 4327

SEQ ID NO: 19003 - protein, 415 aa, Parasutterella sp.; identical to SEQ ID NO: 14058

SEQ ID NO: 19004 - protein, 476 aa, unidentified; identical to SEQ ID NO: 13038

SEQ ID NO: 19005 - protein, 427 aa, unidentified; identical to SEQ ID NO: 6338
  REGION 1..427: note = IscB polypeptide

SEQ ID NO: 19006 - protein, 475 aa, Blautia sp.; identical to SEQ ID NO: 4128

SEQ ID NO: 19007 - protein, 422 aa, unidentified
VVVYVISKDGQPLMPTMRFGKVRRLLRDKKAKVVRRCPFTIKLLYEPSTNVVQECYCGVDTGSKHIGVAVIGNDKVLYKSQTELRSDIKKKMERRKVFRKLRRFRKTRYRKSRFLNRKNSIKKDRLPPSVRHKVQAHIDEIEFCKKILPISGLILEVSQFDTALMKNPSLIDEIVRRWGYQQGFNYGYSSRREAILHRDNYTCQCCGKKNCRLEVHHIKFRRNGGTDDEENLITLCEDCHKGIHAGTVELNKKPKKSKGLKHATHMSIIRSRLLKVYPQAIETFGFVTKANREHLRLPKNHYIDACVIASGGLEFKELDAIFYKRRVSKGDYQLRQGPHSERKIPVGKIQCFRKFDKVKYFGKEYIIKGRMSSGFALLMDIFGNKIDFSYMPRGYKIPKLSNCKRISARRSALCVRVINLHT

SEQ ID NO: 19008 - protein, 501 aa, Desulfotomaculum sp.; identical to SEQ ID NO: 2400

SEQ ID NO: 19009 - protein, 470 aa, unidentified; identical to SEQ ID NO: 2825

SEQ ID NO: 19010 - protein, 456 aa, unidentified
VWLYQAVYNLGEGFLPSSEERTAFYWLLIYRKEHGIMQYVYVLNKHGEPLMPCSPGKARLLLKQQKACVVKRTPFTIKLLYGSAGYKQPITLGVDAGSKHVGLSASTEKRELYREEFTPRNDVVDLLSTRRQNRRSRRNRKTRYRAPRFDNRVHSKHKGWLAPSVEVKIQEHITVIKRICRILPITLVRVETAEFDTQRLKAMLEGKPLPVGTDYQLGEMYDEYNVRQYVLKRDHYTCQCCGAHTTTKKTVKLHVHHLESRKVGGNAPSNLITLCTTCHDALHKGKVSLDGKERGKPLRDAAFMGIMRKTLMARLRDELSIPVQGTYGYITKMRREQNDIKKSHVNDARCISKHPLAEPCSVCYRTKAIRHHNRQTHKANFSKGGTRQRSQMPYVVEGYRLWDKVLYKGQECFVSGRRASGSFTLKKLDGTRISKGVTFKKLRLLETATNYLIERM

SEQ ID NO: 19011 - protein, 424 aa, unidentified; identical to SEQ ID NO: 3434

SEQ ID NO: 19012 - protein, 462 aa, unidentified; identical to SEQ ID NO: 9356

SEQ ID NO: 19013 - protein, 434 aa, unidentified; identical to SEQ ID NO: 8083

SEQ ID NO: 19014 - protein, 409 aa, Bacillus sp.; identical to SEQ ID NO: 17251

SEQ ID NO: 19015 - protein, 451 aa, unidentified
MWTYHYFVVSYYSLRRVNVVFVISKEGKPLMPTKNHAKVRILLKHKKAKVIRRKPFTIQLLYETTTYTQPITLGIDSGYSYIGFSAITEKEELICGEVKLLQGISERLKERAMYRRQRRSRLRYRKPRFDNRKRHNDWLAPSIQHKFDSHIRFINFLKKILPVTDVVIEVANFDTHKLKNPDVEGIGYQQGEQKDFYNLREYILYRDNYKCQLCGREDLPLEVHHIGFWKQDRTNRPSNLITLCIKCHTPKNHQENGKLWGLEPILKPLKEATFMSTVRWKLVNILNCKYTYGYITKFKRVALGLEKTHYNDAFCIAGGINQARTKPIIFEQIRRNNRSLEKFYDAKYIDIRTGKVATGQELFCGRRTRNKNYNTENLRKYRGQKISKGQRRIRTQKYFCQPKDIVIYNGKKYVVKGVQNKGNYIKLEKLNKPVKVSLVKPYEFRKGFCVV

SEQ ID NO: 19016 - protein, 512 aa, unidentified; identical to SEQ ID NO: 5824

SEQ ID NO: 19017 - protein, 450 aa, Clostridium sp.; identical to SEQ ID NO: 9104

SEQ ID NO: 19018 - protein, 423 aa, unidentified; identical to SEQ ID NO: 3612

SEQ ID NO: 19019 - protein, 414 aa, unidentified
MPCSPAKARLLLKEKKAIVKRRTPFTIQLTIATGESKQPVTLGVDAGYKHVGLSASTEKAELYASEVELRQDVSDLLSARRALRQSRRNRKTRYRAPRFNNRLRTKRKGWLAPSVENRINAHLSRIEAVLRLLPVTKISVETASFDMQLLKNPDIAGKEYPEGEQLGFWNVREYVLFRDRHVCQHCYGRSKDPVLNVHHLESRRTGGDSPDNLITLCETCHKALHRGDITLKAKRGKSFRAEAFMGIMRWEVHNRLRALHPGIEVSNTYGYRTKHARIANGIAKSHCADAFCIAGNLGAERLCEFFFQKQTRRNNRQIHKLSILKGGIRKRNQAPFEVKGFRLFDKVACQGEEGFIFGRRSSGFFDVRKLDGTRISAGISYKKLHLLEKRQTYLIEIRKEEAFPPLPEGRGLRA

SEQ ID NO: 19020 - protein, 406 aa, unidentified; identical to SEQ ID NO: 2752

SEQ ID NO: 19021 - protein, 412 aa, unidentified; identical to SEQ ID NO: 18030

SEQ ID NO: 19022 - protein, 477 aa, unidentified; identical to SEQ ID NO: 5307

SEQ ID NO: 19023 - protein, 407 aa, Methanohalophilus sp.
MYVFVLNRNKQPLMPTNPAKARILLKSGKAKVVRRNPFTIKLLYSTSDYTQPCLAGMDTGSNRIGCAVMTNNKVVYQSEITVRNDVSKKMQQRAMYRRTRRARKTRYRPARFNNRRNSRKFNRLPPSIRSKIESHLREHRFIESILPVSKWIVETASFDIHKIINPNVTGTEYQNGNLKGFYNVKSYVLNRDNYTCQHCKGKNKDNQLQCHHIKFRSNGGSDTPENLITLCKTCHEDLHDGKFSITKQQKVTKHATEVGIVKSQLIKSNWNFKKTFGYETKYKREQVLNLPKTHYNDAVAICCNDKTQSIHKDNIVYFKKHVSKGDYQQRKGKRSEKTIPTGKLHGIRKFDLIETIKGIGFVKGKRTSGYFSIMDIFGNIIHSSVNVKKECKRVSARTTTITQKVTI

SEQ ID NO: 19024 - protein, 453 aa, unidentified
LDTVAVISASGKKLMPTNSYRARRLLKSRRAVIHKYRPVFTIKLVDRTNGYTQPIEYKCDTGYQNIGISICSDTKEFVNEQRDLLKDEVKKHSDSRRYRRTRRNHLRYRKKRFDNRRGMISRDGFAPSIRNKRDVHVRLYEEYYKIFPIAKAVFEMGQFDTQVLKAIEAGLPVPKGADYQRGEQYGYATLREAVFARDDYKCICCGKSAIKDGVKLRIHHIGYLSGDRSNRMANLGSVCENCHTPNNHKYGGKLYNLKPKLKELKGATFMTTVRYSMIKNLKAATPNVDIKVTYGAATKLARKDLNVRKTHSNDAYCMGEFHPKHRSDFKHYKKCRRNNRVLSRFYDAKYRDLRDGSTKTGSQLSCGRTNRKISRHTKLDERIYRAHKISEGRISTRRQHYSLRPGDKVLYDGKVYFAKGVQSNGTSIKLANGKVCPLKKVNILQHCNAWAII

SEQ ID NO: 19025 - protein, 557 aa, unidentified; identical to SEQ ID NO: 3108

SEQ ID NO: 19026 - protein, 424 aa, unidentified; identical to SEQ ID NO: 3232

SEQ ID NO: 19027 - protein, 424 aa, unidentified; identical to SEQ ID NO: 2430

SEQ ID NO: 19028 - protein, 275 aa, unidentified
KGSLENAVSEMQEHHCLFCEKPIEHYHHVVPKSENGSNTIANIVGLCTEHHNLVHKDATWQKKLAKEKVGLVKKYSALSVLNQIIPALTKEMNSLFPKHFFVTNGKSTYDYRTAHGVSKDHWLDAYCIACSVLPNDVCDSNINSHVPYELKQFRRHDRRVLHKANMSRVYTLNGKTVATNRHKAIKQTTDSLEEFRQSHPGDVCKLKVKEHHPAYRNLNRNYPGSVFLVDGQVHVMQGVSGSHNGKADGYYNTNGNAYPYYKCKFVVKNEGIVFA

SEQ ID NO: 19029 - protein, 423 aa, unidentified; identical to SEQ ID NO: 4062

SEQ ID NO: 19030 - protein, 431 aa, unidentified; identical to SEQ ID NO: 6230

SEQ ID NO: 19031 - protein, 460 aa, Fischerella sp.; identical to SEQ ID NO: 9149

SEQ ID NO: 19032 - protein, 411 aa, unidentified; identical to SEQ ID NO: 3917

SEQ ID NO: 19033 - protein, 472 aa, unidentified; identical to SEQ ID NO: 4432

SEQ ID NO: 19034 - protein, 457 aa, unidentified; identical to SEQ ID NO: 16359

SEQ ID NO: 19035 - protein, 424 aa, Microcoleus sp.; identical to SEQ ID NO: 8723

SEQ ID NO: 19036 - protein, 415 aa, unidentified; identical to SEQ ID NO: 5047

SEQ ID NO: 19037 - protein, 427 aa, unidentified
LRVFVLNKRGKPLMPCSPAKARLLLKEKKAIVVRRTPFTIQLTIATGESKQPVSLGVDAGYKHVGLSASTEKAELYASEVELRKDITDLLSARRALRQSRRNRKTRYRAPRFDNRIRTKRKGWLAPSVENRINAHLSRIEAVLRLLPITKITVETASFDMQRLKNPDISGKEYQEGEQLGFWNVREYVLFRDGHVCRHCHGRSKDPVLNVHHLESRRTGSDSPDNLITLCETCHKALHRGEITLKAKRGQSFRAQAFMGIMRREVLNRLKASYPELKVHETYGYLTKHARIANGIVKSHGADAFCIAGNLGAERLGEFFFQKQTRRNNRQIHKLSILKGGIRKRNQAPFEAKGFRLFDKVACQGEEGFIFGRRSSGSFDVRKLDGTRISAGISCKKLRLLERRRTYLTEIRKEEALPPLPEGRGLRA

SEQ ID NO: 19038 - protein, 456 aa, unidentified; identical to SEQ ID NO: 7816

SEQ ID NO: 19039 - protein, 413 aa, unidentified
MTSYSFVLDANGKQLAPTKEPKAWFLIRKKRAALVSKYPMVIQLKKEIPEKEICQDEIRCGIDDGGLHVGIALVQKCKTKNKVVFKGTIEQRNDVKHLMEVRRNYRRYHRYHKRYRQARFDNRKSSKREGRIAPSILQKRQATIRVIHWLNKWINITNYWLEDVSVDIRALTDGYQSYRWQYQKSNRLDENIRKAAILRDDGKCMECGKSNCRLEVHHIKPRRRNGSNTLDNLITLCESCHQKTEGQEELYMDRYFSLLKSSDNKNLNYAQHVMIGKMWLRKQLSGLGVLYLTSGGDTANKRIDWNIEKSHANDAVCITDLRPDTCDVKEWTMKPMRRQSKAKTDHVLGIHHRDLVEYTFKNGETHRGYVTALYPEQKAINFQSPTKHCKKVNARKCKLLWKYSKIYWFENAS

SEQ ID NO: 19040 - protein, 501 aa, unidentified; identical to SEQ ID NO: 7018

SEQ ID NO: 19041 - protein, 420 aa, Bacillus sp.
MHAMFVYVLNQHGQPLMPCKPRKARLLLKQKKAKVVKRTPFTIQLLHGSSGYKQKISLGVDAGTKKVGLSATTEKEVLFEGEAELRTDIQKLLATRREFRRSRRNRTTRYRKPRFENRKKPKGWLAPSVQHKVNSHIKLIQLMYDILPITELTIEVAQFDTQKLKNPTIHGDDYQKGEQLGFWNVREYALFRDKHTCQKCKGRSKDKILNVHHIESRKTGGDRPDNLITLCKTCHDEIHRLKLEHTIKRERTSLRDATQMTVMRWFIYNRVKELYPHARLTYGYLTKNTRITNTLPKSHIVDARCISGNPLAKQNDYVFHLKFVRKNNRQLHKATIRKGGVRQNNKAERYVKGFQLFDKVLYEGKESFIFGRRKTGYFDLRLLDGTKIHASASYKKLKRVECAHTLLIERREGQFLPQIN

SEQ ID NO: 19042 - protein, 406 aa, unidentified; identical to SEQ ID NO: 2752

SEQ ID NO: 19043 - protein, 430 aa, Moorena sp.
MQNYVFVIDTNKQPLNPISPKKARRLLDKGKAAVFRMYPFTIILKTAVDNPTISPCQLKIDPGSRFTGFALVQNNQVIWAMELEHRGGLIKKKLEARSAVRRGRRNRHTRYRKPRFLNRRRSEGWLAPSLEHRVLTIETWVKRLIKFCPINEIWVERVKFDTQKMQKPEISGVAYQQGELAGYEVREYLLEKWGRECAYCGKQNVPLQIEHIHPKSKGGSNRVSNLCLACEKCNQRKGNKPIEEFLKKKPSLLQKIKSKAKQPLLDAAAVNTTRNKLVKVLRSVKPVVTGTGAQTKYNRTRLGFSKQHWIDAACVGDIEMLTLKTSQPLLVTCKGPGGRQKAALNKYGYPVRHNPLKPIKGWITGDIAKHQKLGIGKVTPRTKGSFGFTPLGMKGYKSCNPQDISAIHRKDGYTYSFCELLPESSRKWSS

SEQ ID NO: 19044 - protein, 381 aa, unidentified
MTALEERLSKTEYIYVLGFDGKPQMPTRRKRHVLKLLKTGRARIAEDIPFTIQLTYRNAPVLQPVTLAEDPGRTNIGAAVLSPLGDLLFAAVIETRNKEIKKLMADRKKSRQASRRGERKARQRLAKRYGSMLKSGMIMRKLPMYAADKFVTCKFIRNTQARFCNRKRCPDWITPTVQHLVQTHLNIIRKISRYLPVTDIAIEVNRFAFMHMENPKAVGVDFQNGPLKGYGDVKEAIRTQQHGKCLMCKKPIGHFHHIVPRSRGGSDTIQNLAGLCTEFHTKVHTDTAFRKDFDEKKSGQLKKYGALSALNQAVPFICKKLLEEYGEEHVHFCRGLDTSLIRTALGFEKTKKNQMHEVDAYCIGLAALEVNEVKTPAFDHT

SEQ ID NO: 19045 - protein, 515 aa, unidentified
MTALEERLSKTEYIYVLGFDGKPQMPTRRKRHVLKLLKTGRARITEDIPFTIRLTYRNVPVLQPVTLAEDPGRTNIGAAVLSPLGDLLFAAVIETRNKEIKKLMTDRQKSRQASRRGERKARQRLAKRYGSMVKSGMVMRKLPMYAADRFVTCKFIRNTQARFCNRKRCTDWITPTVQHLVQTHLNIIRKISRYLPVTDIAIEVNRFAFMHMENPEAMGVDFQNGPLKGYGDVKEAIRTQQHGKCLMCKKPIAHFHHIVPRSRGGSDTIQNLAGLCTEFHTKVHTDTAFRKDFDEKKSGQLKKYGALSALNQAVPFICKKLLEEYGEEHVHFCRGLDTSLIRTALGFEKTKKNQMHEVNAYCIGLAALEVNEVAAPAFDHTFQIRQFRRQDRSIIHHQTGRSYYQGKEKVAQNRKPGFEQKTTALSQWYKEQVRIHGEKEAEKLRSQLRVEKSCRHYNDMDRFLPGAVFLYEGKRYVLSGRITNGKYLRACGQGMKNFPAAECTFIRHNAGLVFI

SEQ ID NO: 19046 - protein, 319 aa, unidentified
VEQNLRVFVLNKRGKPLMPCSPAKARHLLKEKKAIVVRRTPFTIKLTIATGESKQPVSLGVDAGYKHVGLSASTEKAELYASEVELRQDITDLLSARLALRRSRRNRKTRYLAPRFDNRIRTKRKGWLAPSVENRINAHLSRIEAVLRLLPVTKITVETASFDMQLLKNPDIAEKEYQEGEQLGFWNVREYVLFRDGHVCQYCHGRSKDPVLNVHHLESRRTGGDSPGNLITLCETCHKELHRGEITLKAKRGQSFRAETFMGIMRWEVLDRLKASHPKLEVQNTYGYRTKHARIVNGIAKSHCADAFCIAGNLGAERL

SEQ ID NO: 19047 - protein, 422 aa, unidentified
LNKRGKPLMPCSPAKARLLLKEKKAIVVRRTPFTIQLTIATGESKQPVSLGVDAGYKHVGLSASTEKAELYASEVELRKDITDLLSARRALRQSRRNRKTRYRAPRFDNRIRTKRKGWLAPSVENRINAHLSRIEAVLRLLPITKITVETASFDMQRLKNPDISGKEYQEGEQLGFWNVREYVLFRDGHVCRHCHGRSKDPVLNVHHLESRRTGSDSPDNLITLCVTCHKALHRGEITLKAKRGQSFRAQAFMGIMRREVLNRLKASYPELKVHETYGYLTKHARIANGIVKSHGADAFCIAGNLGAERLGEFFFQKQTRRNNRQIHKLSILKGGIRKRNQAPFEAKGFRLFDKVACQGEEGFIFGRRSSGSFDVRKLDGTRISAGISCKKLRLLEKRRTYLTEIRKEEALPPLPEGRGLRA

SEQ ID NO: 19048 - protein, 536 aa, unidentified; identical to SEQ ID NO: 2718

SEQ ID NO: 19049 - protein, 446 aa, Pseudomonas sp.
VAVYVLDKTGTPLMPCSEKRARLLLERGRARIHRQVPFVIRLVDRRQADSALQSLTLKFDPGSKFTGIALVRQKGQRVSVLSLMELAHRGAAIRQAMQQRAAFRRRRRGQNLRHRTPRFDNRTRPEGWLPPSLRHRLDTTLGWVGRMRNWAPISDLAVERVKFDMQAMQNPEISGVKYQQGELAGYEVREYLLEKWGRCCAYCDAENTPLEIEHIVPRSAGGSDRVPNLTLACRPCNQRKGNQPVEVFLKARSELLARIKAKAKVPLRDAAAVNATRNALFRALLDTGLSVTTGTGAQTKFNRRCLGLPKTHALDAASVGEIRAIEHWQRPTLAIKATGRGEYQRTRLTAHGFPRGYLTRQKRHFGFQTGDQVRAEVPTGKKAGTHQGRVAVRKTGSFNIQTPDGVVQGIHHRHCTLIQRADGYAYSHIQTDSPQSQKEAARAEVR

SEQ ID NO: 19050 - protein, 452 aa, Lactobacillus sp.
MSEIQKVNYIYVVDSNGTPLMPTSRLGMVRRWLKTGQARWFGNSRKIIQFVRPVTTNTQELTLGVDAGFHLGLAVVGNKREYYASESLRKSEKDRITSRRELRRTRRNRLRYRQARFDNRRRKASWLAPSVQHRLDFTIKEIKRLYTFLPIAKLVVEVAPFDNQKLLNPNIKTWEYTHGKTHGFKTIKDYLLARDNYRDALDGKQYPASQLRVHHLVQRKDGGTDQPDNLVLLSDINHTQANHNNGILAKLRENRQKTLDYRGAYFMNILATRLSDYFDNYTTTQGYLTANLRQKYQLEKSHLNDAFIIAGGTDTTLRTNNVYSRQKLRNNNRVLQKFYDAKYIDSRDNKTKPGKELSSGRTRRSRELNYDNLKQFRKTKVKKGRVSIRRNHYQLRPHDVVLNTKTNKIETITGVQNSGTVIKFQTGKTCSIKNVVSLYHVNGMLEKKIENI

SEQ ID NO: 19051 - protein, 409 aa, unidentified; identical to SEQ ID NO: 8791

SEQ ID NO: 19052 - protein, 512 aa, unidentified
MSTVYVLNKDGKPLMPTTRGGHVRHLLKEQKARVARTKPFTIQLLYETDDAVQPLYLGIDPGRTNIGIAVVKADGTAVFTAHLETRNKEIPKLMQDRKKARRARRTNGRRCRRQRRAKANGTISKKCVKQTTAQNGSVSKRAKDIGVIKRRLPGCEKDVLCIGIKNKETKFTNRTRPEGWLTPTANHLLQTHINLVKKIQKFLPISDVVLEVNKFAFMRLDNPNIQKWQYQQGPLYQKGSLENAVSEMQEHHCLFCDKPIDHYHHVVPQSENGSNTIANIVGLCAEHHNLVHKDAAWQKKLAEEKVGLNKKYGALSVLNQIIPALTNKLSVLFPKHFFVTAGKSTHDYRATHGVSKDHWLDAYCIACSVLPSNVCDSNINNHMPYELKQFRRHDRRVLNNENMNRVYTLNNKAVAINRHKAKDQKTVSLEEFRKEHPDDVCKLKVKEHHPTYRNMNRNFPGSVFLVGKQIHVMQGIASSKDGKATKYNDTSATAIAAGKCKFVAKNTGILFV

SEQ ID NO: 19053 - protein, 237 aa, unidentified; identical to SEQ ID NO: 5189

SEQ ID NO: 19054 - protein, 470 aa, unidentified; identical to SEQ ID NO: 2883

SEQ ID NO: 19055 - protein, 423 aa, Parasutterella sp.; identical to SEQ ID NO: 9664

SEQ ID NO: 19056 - protein, 453 aa, unidentified
MSVAVVSKTGMLLMPTSEYRARKLLKSKKAIIHGYHPFTIQLTERGTGYIQPVELCMDTGYIHIGTSVKSEKHEYLGEQIDTLTDERRKHDACRMYRRQRRNRKRYRQPRFNNRERDDGWIAPSLEHKKTIHIQAISRICKVMPVTDITLEMGNFDTQVLKAREEGKPLPQGLDYQHGERYSVTTLREAVFLRDGYTCQCCGRTIKDGAILHAHHVVYRSQGGTNRISNLITVCDKCHTPANHKPGGKLYGWKPKVASFKGATYMTTIRWKLYNEVKVLFPDIDIHIAYGAETKERRRAFDITKSHVNDAFVMGQFHPKHRSKPVCYKKKRRNNRCLEKFYDAKYIDSRDGKKRTGQELFNGRISRNRKKDSKNLHQYRRQKISAGKRAIRKQHYAIQPHDIVIFNGEKFETSGCHNNGTRVILLPQKKSVAIKKLNIYRYAGGYFKSAFNQK

SEQ ID NO: 19057 - protein, 418 aa, unidentified; identical to SEQ ID NO: 4327

SEQ ID NO: 19058 - protein, 512 aa, unidentified
MSTVYVLNKDGKPLMPTTRGGHVRHLLKEQKARVVRAKPFTIQLLYETNDVVQPLYLGIDPGRTNIGVAVVKANGTAVFTAHLETRNKEVPKLMQDRKKARRARRTNGRRCRRQRRAKANGTISKKCVKQDTAQSKNPSKRAKEIGIIKRRLPGYKKDVLCIGIKNKEAKYTNRTRPEGWLTPTANQLLQTHINLVRKMQKFLPISDVVLEVNKFAFMRLDNPDIQKWQYQQGPLYQKGSLENAVSEMQEHHCLFCDKPIDHYHHVVPQSENGSNTIANIVGLCAEHHNLVHKDAAWQKKLAEEKVGLNKKYGALSVLNQIIPALTNKLSVLFPKHFFVTAGKSTHDYRAAHGVSKDHWLDAYCIACSVLPSNVCDSNINNHMPYELKQFRRHDRRVLNNENMNRVYTLDNKAVAINRHKATEQEAASLEEFRKEHPNDVCKLKAKEHHPTYRNMNRNYPGSIFLVGKHVHIMQGIAGSKDGKATTYKDSNANSITASKCKFVAKNSGILFV

SEQ ID NO: 19059 - protein, 413 aa, unidentified; identical to SEQ ID NO: 14501

SEQ ID NO: 19060 - protein, 512 aa, unidentified; identical to SEQ ID NO: 3720

SEQ ID NO: 19061 - protein, 442 aa, unidentified; identical to SEQ ID NO: 2903

SEQ ID NO: 19062 - protein, 408 aa, unidentified
MVYVQDIDGSPLMPTTRHGKVRRLLKSKKATVVNLCPFTIRLLYDTTGYKQEITLGVDAGTKHVGLSATTKSKELYASEVILRSDVVDLLSTRRELRRARRYRLRYRKPRFNNRVKYKKDKWIAPSIRQKIDSHIRIIGFVYSILPVSKLIIEVAQFDTQKIKNPEISGKEYQEGEQLGFWNVREYVIARDGHKCQYCKGKSKDPILNIHHIESRKTGGDSPSNLITLCETCHKEFHKGNIKLKVSRGKSLRDAAVMGIMKWKLYEELRSRYDNVSMTFGYITKYNRIKYGIEKSHISDAFVISKNFNALMLEYHYKVRLIRRHNRQIHKQKVLKGGVKKPNQSSFEVFGFRLFDRVMFEGNYYFIFGRRKSGSFNIRDIDGGNQRDVTYKKLKLLRCKRFMIQKEMN

SEQ ID NO: 19063 - protein, 353 aa, unidentified; identical to SEQ ID NO: 17570

SEQ ID NO: 19064 - protein, 501 aa, unidentified; identical to SEQ ID NO: 9337

SEQ ID NO: 19065 - protein, 440 aa, Clostridium sp.; identical to SEQ ID NO: 10253

SEQ ID NO: 19066 - protein, 431 aa, unidentified
MPNKVYVINKHGRPLMPCSPAKARHLLDAGKAKVKKRTPFTIQLVYGSSGYTQEVILGVDAGSKTIGVSASTKKEELFAANVIPRNDVVDLLSTRREFRRARRNRKTRYRKPRFDNRVRSKHKGWLAPSVEVKIQEHITSIKRVCRILPVSKVVIETAEFDLQLLKAIADGKPVPQGEDYQKGEMYGHYNVRQYVLWRDDYTCQCCGAHATKKKEVRLHVHHLESRKVGGDAPDNQVTLCESCHEKLHKGLITAKDFKKRKRRSTRDATFMGIMRKTLMQMLCSELPIPVVKTRGYITKATREKLLVLPKSHTNDALAIAQGKRGFNVGYLPEIAQIDKIYTIRPVRHHNRQLHKATILKGGIRKSNQTEKYVFGYRLFDKVQFNGQDCFIWGRRTTGIFTIKTINGKMIKDGISFKKLKPVEKSTSYLIA

SEQ ID NO: 19067 - protein, 494 aa, unidentified; identical to SEQ ID NO: 11168

SEQ ID NO: 19068 - protein, 420 aa, unidentified
MQYVYVLNKHGEPLMPCSPRKVRLLLKQKKACVIKRTPFTVKLLHGSAGYKQPVTLGVDAGSKHIGISATTEKHELYREEATPRNDVVDLLSARRAFRRSRRNRKTRYRAPRFNNRVHSKHKGWLAPSVEVKIQEHITLIKHVFRILPVTLVRVETAEFDTQRLKAMLEGKPLPVGTDYQLGEMYDEYNVRQYVLKRDNYTCQCCGAHSTKTKGVKLHVHHIETRRTGGNAPNNLITLCKACHKALHAEKVTLDGKKRGKPLKDAAFMGIMRKTLMERLRKELKIPVQGTYGYITKYLREKNGIPKSHTNDARCISKNLLAIPCDTCYYTKAVRHHNRQLHKATILKGGIRKANQAPYIVKGYRLWDKVAYNGTECFITGRRTSGYFALKKLDGTVVSNSISYKKLRLLEAATNYITERK

SEQ ID NO: 19069 - protein, 307 aa, unidentified
MQLEDPAICGVDFQTGPLKGYDDRDAAVYDLQDGKCLMCKHEITQYHHIVPRSRNGSNTIGNIAGLCDQCHDRVHKDADFAEQMKEKKEGMDKKYGALSVLNQAIPFICKQLETEFGRGHVHYCTGRETSLVRQSTGYQKTRKNQLHEVDAWCIGALALAEIPENVPDFKEIHLIRQFRRQDRSLVNAQTERVYKLGGKMVAKNRKKRTGQEIYALEDWYNRQVETYGKQEADCMRSRLKITKSRRRYNNPNRMMPGAVFLYEGVRYVMRGQHSKGAYLQAVGMENRDFPVRKCKILTRNTGLVFVS

SEQ ID NO: 19070 - protein, 450 aa, Clostridium sp.; identical to SEQ ID NO: 10358

SEQ ID NO: 19071 - protein, 307 aa, Anoxybacillus sp.; identical to SEQ ID NO: 11077

SEQ ID NO: 19072 - protein, 448 aa, unidentified; identical to SEQ ID NO: 8365

SEQ ID NO: 19073 - protein, 490 aa, unidentified; identical to SEQ ID NO: 3566

SEQ ID NO: 19074 - protein, 476 aa, unidentified
LKASGAEGVSHPSLPGKYKYKGGQLMSVAVISKTGERLMPTSEYRARKLLKSGKAIKHSYHPFTIQLTERETGDIQPIELCMDTGYIHIGISVKSEKHEYLAEQIDTLTDERGRHDACRMYRRQRRSRKRYRQARFNNRKRDQGWIAPSLEHKKKIHIQAISRINNVMPITDITLEMGNFDTQVLKAKEEGKPLPHGADYQHGGRYGIATLREAVFSRDGYKCQCCGRTIKDGVILHIHHIKYRSQGGTNSMSNLATVCDKCHTPKNHKPGGKLYNWKPKLSSFKGATFMTAIRWQLYNEVKALFPDIDIHITYGATTKERRRELDIDKSHVNDAVVMGQFHPKHRIKAVLYKKKRRNNRCLEKFYDAKYIDSRDGKKRSGQELFNGRINRNHKKDSENLHQYRLQKVTAGKRAVRKQHYKIQPHDTVIYENRKRETAGCHCNGTRMMLLPDKKSASIKKVKIYRYAGGYFKSAFN

SEQ ID NO: 19075 - protein, 457 aa, unidentified
MDAVAVISASGKPLMPTNPVRARKLIKKGKAVIYKYCPLFTIRLTERTDGDIQTIEYCCDTGYQHIGLSIKSRKHEYVNEQRDLLPNETERHNDSRKYRKARRRRKLRHRACRRDNRHDNQICKDGYAPSIRNKRDQHISLYRSYTEILPVERAVFEMGQFDTQVLKAIEKGEPLPQGKDYQHGERYGYATLREAVFARDDYTCICCGKNAFKDKRILCVHHLGFRIGDRTNGLANLATVCTKCHTPKNHQPKGKLYNLKPELKDFKGATFMTMVRWDMLDKLKAVSKGIQVDVTYGAATKEARRDLKIKKSHANDAYCMGSFYPSHRTDLKRYEKCRRNNRVLSKFYDATYIDIRDGKKKKANALGCNRTKRRESRRSEKNERIYRGEKISKGRIVLRTRRAVIRPGDIVYVGKKKYIVASSKNLGAQLKLADGSLLTTSKVTKIIHCGGWKRVTL

SEQ ID NO: 19076 - protein, 414 aa, unidentified
MVYVINKQGQALMPTERFGKVRRLLKNSLAHVVCRIPFTIQLDYDTTDYTQPVSLGIDAGSKHIGISATTSEKELYAADVELRNDIVDKLSTRRELRRTRRSRLRYRKARFNNRVSSKRKGWLAPSVENKIQTHLTVVEKIHKFLPITNIVVETAAFDIQKIKNPSISGSGYQQGEQLDFFNVREYVLFRDNHICQHCKGKSKDKVLNVHHIESRKTGGDSPNNLITLCETCHKAYHRGEFELNVKRGKSFRDSAFMGIMRWGFYDRLKNIYPNVSMTFGYITKNARITNNLPKDHYVDARCISGNPVAKPLGYYFYQKKVRCQNRQIHKANFLKGGRKKLNQAPFLVKGFRLFDLVEYQKELYYIFGRRSSGSFDIRKLDGTKVNKGSINCKYLRLVDTRKSILIEKRTQVNL

SEQ ID NO: 19077 - protein, 515 aa, unidentified
MTALEEKLSKTEYIYVLGFDGKPQMPTRRKRHVLKLLKTGRARIAEDIPFTIRLTYRNAPVLQPVTLAEDPGRTNIGAAVLSPLGDLLFAAVIETRNKEIKKLMADRQKSRQASRRGERKARQRLAKRYGSMVKSGMVMRKLPMYAADKFVICKFIRNTQARFCNRKRCPDWITPTVQHLVQTHLNIIRKISRYLPVTDIAFEVSRFAFMHMENPEAIGVDFQNGPLKGYGDVKEAIRTQQHGKCLMCKKPIAHFHHIVPRSRGDSDTIQNLAGLCTECHTKVHTDTAFRKDFDEKKSGQLKKYGALSALNQAVPFICKKLLEEYGEEHVHFCRGLDTSLIRTAFGFEKTKKNQMHEVDAYCIGLAALEVNEVETPAFDHTFQIRQFRRQDRSIIHHQTGRSYYQGKEKVAQNRKPGFEQKTTALSQWYKEQIRIHGEKEAEKLRSQLRVEKSCRHYNDMDRFLPGAVFLYEGKRYVLSGRITNGKYLRACGQGMKNFPAAECTFIRHNAGLVFI

SEQ ID NO: 19078 - protein, 442 aa, unidentified
MSTTVFVLDKKHRPLMPCRPARARRLLRAGRARVVKRFPFVIRLVDRTVEQSEVQPVLIKLDPGSRETGAAVVRDDGKKRHHALAFFVIKHRGGAIRDALKARSAFRRRRRSQNLRCRSPRFLNRVKPKGWLPPSLRHRVETTLSFVRRMCRYLPVSGIAAELVKFDSQKLQTPEVSGIEYQQGTLFEYEVREYLLEKFGRKCVYCGAEGVPLNIDHVVPRAKGGSNRVSNLVLACVSCNQKKGARSLEDFLKGKPEVLARVRRELKTPLRDAAAVNATRWVLFNELKATGLPVETGSGALTKFNRHAFGVEKEHWLDALCVGRLNGAVTRKGLNVLEIRCMGRGSRQRTRLTKYGFPRGYLMRQKCVHGFATGDMVEANVPKGKKAGLWRGRVAVRVSGSFNIQTPKGVIQGVGWKHCRLISHNDGYGYAWLGHAPHSSPA

SEQ ID NO: 19079 - protein, 515 aa, unidentified; identical to SEQ ID NO: 5111

SEQ ID NO: 19080 - protein, 419 aa, unidentified; identical to SEQ ID NO: 10960

SEQ ID NO: 19081 - protein, 428 aa, unidentified; identical to SEQ ID NO: 14557

SEQ ID NO: 19082 - protein, 312 aa, unidentified
MPCSPAKARLLLKEKKAIVKRRTPFTIQLTIATGETKQPVSLGVDAGYKHVGLSASTEKAELYASEVELRQDITDLLSARRALRQSRRNRKTRYRAPRFDNRIRTKRKGWLAPSVENRINAHLSRIEAVLRLLPVTKITVETASFDLQLLKNPDISGKEYQEGEQLGFWNIREYVLCRDGHVCQHCYGRSKDPVLNVHHLESRRTGGDSPGNLITLCETCHKALHRGEITLKAKRGQSFRAEAFMGIMRWEVLNRLKASHSELKVHNTYGYLTKHARIENGIAKSHGATRLLNNIKHNAKKLQKQFVFPYLL

SEQ ID NO: 19083 - protein, 443 aa, Shewanella sp.; identical to SEQ ID NO: 16837

SEQ ID NO: 19084 - protein, 414 aa, unidentified; identical to SEQ ID NO: 14692

SEQ ID NO: 19085 - protein, 408 aa, unidentified
MVYVQDINGKPMMPTTRHGKVRRLLKENKAVVVSLCPFTIKLTYVTSDYKQEIVLGVDAGTKHVGLSATTKSKELYSSEVILRNDIVDLLSTRRELRKTRRNRLRYRKPRFDNRVKSERSGWIAPSVKYKIDAHIRVVENVCSILPISRIVIEVAQFDTQKIKNPNISGKEYQEGDQLGFWNTREYVLARDGHKCQYCKGKSKDKILNVHHIESRKTGGDSPSNLITLCETCHKEYHKGNIDLKIKRGKSLRDAAVMGIMKWRLYEELKSKYDNISMTFGYVTKYNRINHDIEKSHVSDAFVISKNFNAIRLGYYYKVRLVRRHNRQIHKQKIQKGGIKRLNQSPFEVFGFRLFDRVMFENSYYFIFGRRKTGSFNIRDIDGKSQKNITYKKFKLSRCKRFMIQKEMN

SEQ ID NO: 19086 - protein, 424 aa, unidentified; identical to SEQ ID NO: 4383

SEQ ID NO: 19087 - protein, 422 aa, unidentified; identical to SEQ ID NO: 5333

SEQ ID NO: 19088 - protein, 415 aa, unidentified
MVYVVANDGQPLMPTERHGKVCRMLKSGIAKVVKKCPFTIQLQYESERNVQPVALGIDAGSKHVGVSATTKAKVLYESDVELRDDIVKLLATRRQLRLSRRSRKTRYRPVRFDNRKRKEGWLTPSIRQKIESHLTVVANVCKILPVSQIIVETASFDIQKIKNPDIQGIEYQQGEQMDFWNIREYVLFWDGHTCQCCKGRSKDKILNVHHIESRKTGGNAPNNLITLCETCHKGYHNGTVILPKNIKHGMQFKDAAFMGIMRWTFYNTLKEQYEPDIPVSMTYGYLTKNTRIEHGLPKEHYIDARCISGNPDAVSDGTYYYQKKVRCHNRQIHKQTILKDGVRKSNQAEYLVKGYRLFDKVRYQGREYFIFGRRKSGFFDIRTLSGEKVNKGSISVKKLTFADTRKNYLTERRTV

SEQ ID NO: 19089 - protein, 470 aa, Blautia sp.; identical to SEQ ID NO: 2925

SEQ ID NO: 19090 - protein, 451 aa, unidentified; identical to SEQ ID NO: 3061

SEQ ID NO: 19091 - protein, 384 aa, unidentified
MSKRKLMQSRASSRRGRRHRKTRYRHPKWRPKAKRVYCEIPDRKGRHWKKKEITFASKRAKGWLPPSLQSKTDHHIWWIKKLQDLLPEGYRLSIELGRFDPARLKDPEIHGELYQKGPQYDYENVRAYVLNRNRYTCQVCGKKGGKLHVHHILYRSHGATDDPQYMATVCSDCHNTENHQQGGILYQWMQKQKKFTRGLRDATFMNILRKRLIEAFPGATFTYGNITKADRERLRLPKSHGNDATAIAIVKTGIMTVKDKEPVIYIQQVRRKKRSLHEETPRKGRKEPNRKASRYDKNTKAVTVTKRKNKKKITITGCLFDRVELNGKKGWISGFTDKSCYVKDENDQYIRTSPKYKQVSLSKLKILHHCGNWAIGARQSLGKG

SEQ ID NO: 19092 - protein, 420 aa, unidentified
MQYVYVLNKHSEPLMPCSPGKARLLLKRQKACVVKRTPFTIKLLHGSAGYKQPITLGVDAGSKHVGLSASTEKRELYSEEFTPRNDVVELLSTRRQNRRSRRYRKTRYRAPRFNNRVHSKHKGWFAPSVEVKIQEHITVIKRICRILPITLVRVETAEFDTQRLKAMLAGKPLPVGTDYQLGEMYDEYNVRQYVLKRDNYTCQCCGAHTTAKKAVKLHVHHLESRKVGGNAPSNLITLCVTCHNNLHKGKITLDGKKRGKTLRDAAFMGIMRNTLLTRLHNELNIPVQNTYGYITKLLREQNDIKKSHVNDARCISKHPLAVPCSVCYRTKAIRHHNRQIHKAKILKGGIRKANQAPYIVKGFHLWDKVLYNGQECFISGRRSSGYFALRKLDGTAITNSISFRKLRLLEPATNYLIERM

SEQ ID NO: 19093 - protein, 431 aa, unidentified
MPNKVYVINKHGRPLMPCSPAKARHLLDAGKAKVKKRTPFTIQLVYGSSGYTQEVILGVDAGSKTIGMSASTTKEELLSAEVKPRNDVVDLLSTRREFRRARRNRKTRYRKPRFDNRVRSKHKGWLAPSVEVKIQEHITAIRRVCGILPVSKVVIETAEFDLQLLKAIADGKPVPQGEDYQQGEMYGHYNVRQYVLWRDGYTCQCCGAHATKKKEVRLHVHHLESRKVGGDAPDNQVTLCESCHEKLHKGLIAEKDFKKRKRRSTRDATFMGIMRKTLMQRLCSELPIPVVKTRGYITKATREKLLVLPKSHTNDALAIAQGKQGFNVGYLPEIAQIDKIYTIRPVRHHNRQLHKAAILKGGIRKSNQAGKYVFGYRLFDKVQFNGQDCFVWRRRTTGIFTIKTINGKMIKDGISFKKLKLAEKSTSYLIA

SEQ ID NO: 19094 - protein, 512 aa, unidentified; identical to SEQ ID NO: 5651

SEQ ID NO: 19095 - protein, 430 aa, Microvirga sp.; identical to SEQ ID NO: 7723

SEQ ID NO: 19096 - protein, 496 aa, unidentified
MRYVYVLDVDGKPLMPTCRFGKVRRMLKSGQAKAVDTLPFTIQLTYKPRTRILQPVTLGQDPGRTNIGMAAVRFDGKELGRFHCITRNKEIPKLMADRMAARKASRRGERLARKRLARKLHTTAKHLNGRILPGCSEPIAVKDIINTESRFNNRLRPEGWLTPTATQLLRTHINLFRKLSGILPVTDVAVELNKFAFMQLDNPEMKKREIDFCHGPLCGTGGLEAAVKEQQDGKCLLCGKESIGHYHHIVPRSRRGSNTIANIAGLCPKCHELVHKDADTAERLTEMKTGLMKKYGGTSVLNQIIPKLVETLADLFPGHFHVTNGWNTKEFREKHHLEKDHDVDAYCIACSHLKPEETLVETEPFEILQFRKHNRAIIHHQTERTYKLDGVTVAKKRMEQKTDSLEDWYVDMAKEHGKTQADAMRSRLTVIKSTRYYNTPGRMMPGTVFLYEGKRYVMTGQITNGKYYRAYGQEKRNFPAVKVRILTKNTGLVFVA

SEQ ID NO: 19097 - protein, 306 aa, unidentified
MPVAVISKTGERLMPTSEHRARKLLKSGKAIKYSYHPSTIQLTERESGDVQPIELCVDTGYIHIGISVKSEKHEYLAEQIDTLTDEKARHDACRMYRRQRRSRKRYRQPRFNNRKHNDRWIAPSLEHKKSIHIQAILRICKVMPVTDITLEMGNFDTQVLKAREEGKPLPQGVDYQHGERYGITTLREAVFARDGYTCQCCGRAIKDGAILHVHHIVYRSQGGTNRMSNLITVCDKCHTPANHKQGGKLYNWKPKIASFKGATYMTTIRWKLYNEVKALFPDIDINIHITYGAETKERRRAFDITK

SEQ ID NO: 19098 - protein, 416 aa, Parasutterella sp.; identical to SEQ ID NO: 10114

SEQ ID NO: 19099 - protein, 456 aa, unidentified
MSTCVCVLSNNGERLMPTIRLGKVRHLLKDGKAKIIKHHPFTIQLLYDSETNIQPIEICEDVGYNYIGISVKSQSHEYVSAQYDTLQDEKACHDSCRKLRRSRRNRLRYRKPRFDNRKRGEGWLAPSLKHKKELNVNVVKMYCAVMPITHATVEVGSFDTMLVKAIQEGKAIPEGADYQKGPRYNLATLREAVFYRDNYVCKVCGRKATEGAILHVHHMFYWKGRHGNSLSELITVCEKCHTPANHQKGGKLYGFGENVKFADLSGAAFMNTVRWQIVNELYAAFGKDFVTVTYGAMTKEKRIALHLEKSHNNDAYAMGNCHPAHRCEFGHYQKRCRNNRVLEKFYDATYIDTRTGDKAKGKELFNGRISRNHKKDSEDLHKYRSKKVSKGRRSIRRQRYAIQPYDTVRLESKSYITSGCHNKGTRLLIPANGKSKSVAISKVQVVCHAGAWIQII

SEQ ID NO: 19100 - protein, 518 aa, unidentified
LSNLKLIDALLEKTEYIYVLGIDGKPQMPTNRKVRIRSLFKSGRAKIVDTVPFTIRLVYENDAVLQSITIAEDPGRTNIGTAVLTQLGDLVFSTVVETRNKSIKKLMTDRKAHRQASRRGERKARQRLAKKHGSMIKAGMMMRKLPQYAADKFVTCKIIKNTEARFCNRKRMPDWLTPTVNHLVQTHINLIKKIEKYLPITDVAIEVNRFAFMQMENPNINGLDFQNGPLKGFDDVKAAIREQQHGKCLMCKNDIEHFHHIVPRSKGGSDTIQNQAGLCKKCHAKVHTDSEFLAKFKDKKEGLIKKYGALSALNQAVPFICKELIKIYGVEHVHFCTGKDTSLIRSSLGYEKTKENQMHEVDAYCIGLAAIGADKVKRPSFNNVFKIKQFRRQDRQRVHYQKERTYYLDGKKIATNRKPRFEQKGNALSDWYKEQIEAYGQHEAGKMRSRLTVKKSKRSYNTAKRLMPGCIFYYDGQRHVMTGQSSYGRYLRAYNCGTKDFHASKCQIIRFNTGLVFV

SEQ ID NO: 19101 - protein, 421 aa, unidentified
MRGQPLMPCSPAKARHLLKAGKAVVKRRTPFTIQLRIATGETKQNVTLGVDAGAKHVGLSAATEKEEVFASEVELRQDITGLLAARLSLRRDRRHRKTRYRAPRFLNRVRSKHKGWLAPSVENRIQAHMSRIDAVCRLLPVTKIVIETASFDIQKIKDPSVEGTDYQQGDQLGFWNVREYVLFRDGHVCQHCHGRSKDKILNVHHLESRQTGGDAPNNLITLCETCHKAYHAGKIKLKVKRGQSFRAEAFMGIMRWTLLDRVRKAHPGLPVENTYGYLTKHTRITHGLPKTHCVDAYCIAGNLKAVRRGVYLHQRQMRKHNRQIHKFTVLSKRLEDGTKIGYRKLNQSPYLVHGFRLFDKVRCLGQIGFIFGRRSSGYFDVRRLDGVKLSPSISWRKLTLLEKRSTYLTELRKQDGASSPV

SEQ ID NO: 19102 - protein, 465 aa, unidentified
MSTCACVLSKNGERLMPTIRLGKVRHLLKDGKAKIIKHHPFTIQLLYDSETNIQPIEICEDVGYNYIGISVKSQSHEYVSAQYDTLQDEKSCHDACRRMCRTRRNRLRYRQKRFDNRKRDKGWLAPSLKHKKELNVNVIKMYCEVVPITHATVEVGSFDTMLVKAIEEGKATPEGADYQKGPRYNLATLREAVFYRDNYTCQVCGREASEGAILHVHHMFYWKGRHDNSLSELITVCEKCHTPANHQKGGKLYGFGEDIKFANLSGAAFMNTVRWQIVNELYAAFGKPFVTFTYGAMTKEKRIALHLEKSHNNDAYAMGEFHPNCRCTFEHYEKVRRNNRILEKFYDSRYIDIRTGEIATGKELFNGRINRSHKKDSENLHKYRGKRIRKGYRALRRKKVALNPGDLVSLNGEILTVHGTHTKKNGSVNVEFKTPSKSGKKSTSLKKLKIIKTISPMRSAWDKVS

SEQ ID NO: 19103 - protein, 355 aa, unidentified; identical to SEQ ID NO: 12164

SEQ ID NO: 19104 - protein, 523 aa, unidentified
VPLSLNRQAEKKASTSAVTKHANARREEAAGMQSQYKGVTATNERKKNMVITLDKNKRPLGFMSERRCRILLEKKRAVLYRYFPTIVILKDVDARKLSRLSSYRIKIDPGAKYTGIAIVMDDTNEFMYAMQIEHRGEQIKKNLDTRRSARRNRRSRETGYRRPKWGNQCTAKEHRQSYDSRRDENWLPPSVKSTADNILSWIRRLCRWINITNCSIESVRFDTQLMENPDIEGVEYQQGTLYGYEVKEYLLEKYGHTCQYCGGKSNDPILEWEHMLPRSRGGSDRLKNATLACHNCNQDKGNHTLEEWQTILQDRIPKERGKQKELDQIRQKFVQQVMEGKAPLKGLRYAAWVNSSRRYSQRHLYLRFPELECSSGGRTKYNRNVLKYPKEHHYDALCVGEIPEDGFVDRTHGYYLYAKATGRGTRLRGQINQCGVIIRKWMDRSKTAFGFQTGDLVVADVPKDTKYKYKGHFSGRVMIRKSGSFDIRTLSGELVTVNAKFCRLLQNNSGYQMMIKRAIPLGN

SEQ ID NO: 19105 - protein, 442 aa, unidentified; identical to SEQ ID NO: 3791

SEQ ID NO: 19106 - protein, 446 aa, Lactobacillus sp.; identical to SEQ ID NO: 12236

SEQ ID NO: 19107 - protein, 476 aa, unidentified
LAASGTEGVSHPGLPGKYKHKGGQLMSVAVISKTGERLMPTSEYRARKLLKSGKAIKHSYHPFTIQLTERKTGNIQPIELCMDTGYIHIGISVKSEKHEYLTEQIDTLTDERSRHNARRMYRSQRRNRKRYRQPRFNNRKKDKGWIAPSLEHKKNIHVQAISRINNVMPLTDITMEMGNFDTQVLKAKEEGRPLPQGVDYQHGERYSIATLREAVFARDGYKCQCCGRTIKDGAILHVHHIKYRSQGGTNSISNLATVCDKCHTPKNHKPGGKLYGWKPKLPSFKGATFMTTIRWQLYNEAKALFPDIDIHITYGAATKERRRKLDIDKSHVNDAFVMGQFHPKHRIKAILCKKKRRNNRCLEKFYDAKYIDSRDGKKRSGQELFNGRINRNHKKDSENLHQYRLQKVTAGKRTVRKQHYSVQPHDIIIYESRKRETTGCHCNGARVMLLPDKKSVSIKKIKIYRYAGGYFKSTFN

SEQ ID NO: 19108 - protein, 428 aa, Enterococcus sp.; identical to SEQ ID NO: 4335

SEQ ID NO: 19109 - protein, 442 aa, unidentified; identical to SEQ ID NO: 5396

SEQ ID NO: 19110 - protein, 423 aa, unidentified; identical to SEQ ID NO: 3951

SEQ ID NO: 19111 - protein, 465 aa, unidentified; identical to SEQ ID NO: 16702

SEQ ID NO: 19112 - protein, 411 aa, unidentified; identical to SEQ ID NO: 6901

SEQ ID NO: 19113 - protein, 418 aa, unidentified; identical to SEQ ID NO: 5294

SEQ ID NO: 19114 - protein, 418 aa, unidentified; identical to SEQ ID NO: 7351

SEQ ID NO: 19115 - protein, 472 aa, unidentified; identical to SEQ ID NO: 8680

SEQ ID NO: 19116 - protein, 421 aa, unidentified; identical to SEQ ID NO: 8171

SEQ ID NO: 19117 - protein, 512 aa, unidentified
MSTVYVLNKDGKPLMPTTRCGHVRHLLKEQKARVVTSKPFTIQLLYEADDVVQSLYLGIDPGRTNIGVAVVKADGTAVFTAHLETRNKEIPKLMKKRKESRRARRTNGRRCRRQRRAKANGTISKKCVKHDTAQNGSVSKRAKEIGVIKRHLPGCEKDVLCIGIKNKEAKFSNRTRPEGWLTPTANQLLQTHINLVKKIQKFLPISDVVLEINKFAFMRLDNPNVQKWQYQQGPLYQKANLEETVSEMQEHHCLFCKKKIDHYHHVVPQHKNGSNTIDNIIGLCTQHHDLVHKDATWQKRLAKKKTGLNKKYGALSVLNQIIPALTKELSSLFPKHFFVTNGKSTYDYRAAHGVSKDHWLDAYCIACSVLPNDTCDKTINSRVPYELKQFRRHDRRALNNENMSRVYTFNGKMVATNRHKATEQTTDSLEEFRQRQPNDVCNLKVKERHPTYRNMNRNYPGSVFLVGNQVHVMQGIAGSKDGEATTYKDTNANSIAAGKCKFVAKNSGILFV

SEQ ID NO: 19118 - protein, 430 aa, unidentified
MPKVYVLNRHGRPLMPCTPAKARHLLDAGKAKVRHRTPFTIQLLYGSTGYTQEVILGVDAGSKTIGLSAATETEELFSAEVKPRNDVVELMSARRQFRRARRNRTTRYRKPRFDNRVRSKHKGWLAPSVEVKIQEHMTAIRRACAILPVSKVVVETAEFDLQLLKAVAEGKPVPQGEDYQKGEMYGHYNVRQYVLWRDSYTCRICGAHGSVRKGVPLHVHHLESRRVGGDAPDNLVTLCTACHDKLHKGIIMAADIKKRKRRSTRDATFMGIMRMTLLRRLREQLPVPVVETRGYITKATRENLLVLPKSHTNDALAIAHGPQGFRAEYLPNIRQADRLYTICPVRHHNRQLHKATILKGGVRKANQAEKYICGFRLYDKVLYNGIECFVWGRRTSGSFLLRQLNGEKVKDGVSYKHLKLLERSQSYLVA

SEQ ID NO: 19119 - protein, 415 aa, unidentified; identical to SEQ ID NO: 5047

SEQ ID NO: 19120 - protein, 431 aa, unidentified
MPNKVYVINKHGRPLMPCSPAKARHLLDAGKAKVKKRTPFTIQLVYGSSGYTQEVILGVDAGSKTIGVSASTKKEELFAANVIPRNDVVDLLSTRRESRRARRNRKTRYRKPRFDNRVRSKHKGWLAPSVEVKIQEHITSIKMVCRILPVSKVVIETAEFDLQLLKAIADGKPVPQGEDYQQGEMYGHYNVRQYVLWRDDYTCQCCGAHATKKKEVRLHVHHLESRKVGGDAPDNQVTLCESCHEKLHKGLIAEKDFKKRKRRSTRDATFMGIMRKTLMQRLCSELPIPVVKTRDYITKATREKLLVLPKSHTNDALAIAQGKQGFNVGYLPEILQIDKIYTIRPVRHHNRQLHKAAILKGGIRKSNQAGKYVFGYRLFDKVQFNGQDCFVWRRRTTGIFTIKTINGKMIKDGISFKKLKLVEKSTGYLIA

SEQ ID NO: 19121 - protein, 457 aa, unidentified; identical to SEQ ID NO: 14039

SEQ ID NO: 19122 - protein, 454 aa, unidentified
VSYTARYVPAYRIKHITKKEAPYMVYVLDIDGQPLMPTSRHRKVRKLLNSHLAKVVKRCPFTIQLLYQSTKETQPVSLGVDAGSRHIGLAATTEQKVVYQEELVPRNAVVKLLSARRALRSSRRSRKTRYRKPRFNNRVHSKHKGWLAPSVEVKIQEHITAIKRICQILPISDIHVETAEFDLQRLKAMEEGRPLPVGTDYQLGEQYDFYNTRQYVLHRDEYTCQCCGTHDNNVKLHVHHIESRQTGGDAPNNLITLCEHCHKLLHAGKTILPKGKKRGKSYRDATFMGIMRKTLLERLKKEIDVHVEGTYGYITKYWRERAGLEKSHINDAICISKHPYARPLETYYLTKAVRHHNRQIHKTKFSKGGIRKRNQAPYLVKGFRLFDKVLYQGESYFIFGRRITGYFDIRTLDGTKVNKGSTSYKKLRIQDTAEAYLTEVRAIPHMNEFTCVLA

SEQ ID NO: 19123 - protein, 324 aa, Enterococcus sp.; identical to SEQ ID NO: 12172

SEQ ID NO: 19124 - protein, 411 aa, unidentified; identical to SEQ ID NO: 2606

SEQ ID NO: 19125 - protein, 350 aa, Halomonas sp.
  VARIANT 350: note = X can be any naturally occurring amino acid
MAVFVLDKKKQPLMPCSEKRARLLLARGRAVVHKRYPFTIRLKNRVGGEAQPLRLGIDPGSKTTGLALMRETEGELRHVLCLFELIHRGYQIKKALQQRAAFRRRRRSANLRYRAPRFNNRIKPKGWLAPSLQHRVDTVMAWVNRLSKSAPITGISQELVRFDTQKLENPEISGVEYQQGTLLGYEVREYLLEKWGRECAYCGTADTPLEIEHVVPRSRGGSNRVSNLTLSCHPCNAEKDSQTLTDFFATNKGLKKRLKANGLSADAQLERVQRQLKQPMRDASAVNATRWALFSALKTTDLPVAVSSGGHTKYNRQRLNIPKTHALDAACVGAFEKLHDWTVPTLTIKX

SEQ ID NO: 19126 - protein, 453 aa, Lactobacillus sp.; identical to SEQ ID NO: 2687

SEQ ID NO: 19127 - protein, 470 aa, unidentified
MSVFVVGLNGCRLMPVSERKARLLLKGGKASVYRKVPFTIKLNYKTGSTVQPGYLGIDTGSQHIGVSVVQKDGTVLHKEEIGLRDSMSKRKLLESRASSRRGRRYRKTRYRHPKWKPKTKRIYNEKADRKGRHWKKQKNTFTSKRQAGWLPPSLQSKTGHHIQWIRKLLDLLPEGYRLSIELGRFDPARMKDPEIHGELYQKGPQYDYENVRAYVLARDGYTCRVCKKKGGKLHVHHILYRSRGASDNPKYMAAVCSKCHTTENHLPGGILYQWMQDQKKFTRGLRDATFMNILKKRLRKAFPDAVFTYGNITKADREKLELPKSHGNDATAIALVKTEVKSVKDEEPVIHIQQVRRKKRSLHEETPRKGRKEPNRTASRSDKNTKSVTVTKGSGEKKASMTACLFDRVELDGKKGWITGFTGTSCYVKDKEDNYICTSPKYKQVSISRLRILHHCGNWAIGAEKPLGKG

SEQ ID NO: 19128 - protein, 414 aa, unidentified; identical to SEQ ID NO: 2588

SEQ ID NO: 19129 - protein, 426 aa, unidentified
  REGION 1..426: note = IscB polypeptide
VFVVDQNRKPQNPVHPAKARMLLDGQRAAVLRMFPFTIILKEVIADQPRTLRVSVDPGSRKTGIVLVEESSNRVVWAGEIEHRGMTIKKRMDARRTIRRSRRSRKTRHREPRFLNRTRPGSWLPPSLSSRVVNVETWIRRLSRWSPVGSISMELVKFDTQLMDNAEISGVEYQQGELQGYEVREYLLEKWSRNCVYCGVMGVPLQVEHITPRSRGGTNRVSNLAISCRDCNIEKGTMTAEEFGHPKIQEQAKRPLKDAAAVNATRWALFHRLKQTGLPLEVGTGGRTKFNRTRQGYPKAHWIDAACVGESGSKVRLDPSQTILAIGAKGWGSRQSCRMDRFGFPRTGPKGSRIVHGFRTGDLVKAMVLKGKFIGTHLGRVAIRATGSFTIDGVTTTSWKNCQIVQRVDGYSCSHSHSKENGNSSHD

SEQ ID NO: 19130 - protein, 457 aa, unidentified
MSKTLPNQVFVLDTDKKPLTPCLPVIARKLLNAGKAKVFKLYPFTIILKKSVNDIPEPIEIRIDLGSKTTGIALIQGTQVIWGAQVTHRGQAIKSRLETRRAIRRSRRNRKTRYRKARFLNRTRPKGWLPPSWQHRVLTTMTWVSRLRKLAPIQSIAFELVSFDTQKMQNPEISGVEYQQGELQGYEVRQYLLEKWNRKCAYCGIENLPLQVEHINPRAKGGSNRVSNLCLACEKCNLKKGTQDVKDFLKKKPEILRKVMSQAKTPLKDAAAVNATKSALFQALKATAIELIYVGRGSLTKFNRTNLKFPKAHWIDAACCGDVSQGLTLAVNQPLLIKAMGWGSRQVVQTDKYGFPRSGYKPKKKVAGWNTGDIVSVIDGKHQGVKCKRIKTTRFKGNFDIRVNDSVISVSRNQIKPVHRNDGYNYSFVRDCREMSEKKVREHCVTYYRYEYLRRGC

SEQ ID NO: 19131 - protein, 445 aa, Petrotoga sp.; identical to SEQ ID NO: 7625

SEQ ID NO: 19132 - protein, 404 aa, unidentified
LRVFVLNKRGKPLMPCSPAKARLLLKEKKAIVVRRTPFTIQLTIATGEAKQPVSLGVDAGYKHVGLSASTEKAELYASEVELRQDVSDLLSARRALRQSRRSRNTRYRAPRFDNRIRTKRKGWLAPTVENRINVHLSRIETVLRLLPVTKITVETASFDTQLLKNPDIAGKEYQEGEQLGFWNVREYVLFRDGHVCQHCHGRSKDPVLNVHHLESRRTGGDSPGNLITLCETCHKALHRGEIKLKAKRGRSFRAETFMGIMRWGVLNRLKASHPKLEVHNAYGYRTKHARIVNGIDKSHCADAFCIAGNLGAERLCEFFFQKQTRRNNRQIHKLSILKGGIRKRNQAPFEIKGFRLFDKVASKGEESFIFGRRSSGYFDVRKLDGTRISAGISCKKLRLLEKRR

SEQ ID NO: 19133 - protein, 432 aa, unidentified; identical to SEQ ID NO: 14025

SEQ ID NO: 19134 - protein, 408 aa, unidentified; identical to SEQ ID NO: 4614

SEQ ID NO: 19135 - protein, 424 aa, Calothrix sp.; identical to SEQ ID NO: 13167

SEQ ID NO: 19136 - protein, 470 aa, unidentified; identical to SEQ ID NO: 5472

SEQ ID NO: 19137 - protein, 415 aa, unidentified
MVYVLDKNGQPLMPTDRHRKVRLMLQSGQAKVIKRCPFTIQLNYDSGHQTQEISLGIDAGSKHIGVSATTKIKVLYEADVELRNDIVDLLSSRRELRRGRRNRKTRYRQAKFNNRRRGNGWLAPSIRQKIGTHLTVVENICKILPISRIMVETASFDIQKIKNPDIQGAEYQQGDQLEFWNVREYVLFRDGHICQCCKGKSKDKILNVHHIESRKTGGNAPNNLITLCEICHTGYHKGAVQLPKTVKRGMRFKDAAFMGIMRWAFYEALKQQYEPVALVHNTYGYITKHTRIAYNLPKEHYVDARCISGNPEASSNGEYYYQKKVRCHNRQIHKLTVLKGGIRKQNQATYLVKGYRLFDKVSYQGKGYFVFGRRQSGFFDIRTLSGEKVNKGSLSCKKLKFIATRTYYLTERRAV

SEQ ID NO: 19138 - protein, 431 aa, unidentified; identical to SEQ ID NO: 3401

SEQ ID NO: 19139 - protein, 465 aa, unidentified
MSTCVCVLSNSGERLMPTFRLGKVRHLLKDGKAKIVKHHPFTIQLLYDSKTNTQPIEICEDVGYNYIGISVKSQSHEYVSAQYDTLQDEKACHDSCRKLRRSRRNRLRYRKPRFDNRKRGEGWLAPSLRHKKELNVNVVKMYCAVMPITHATVEVGSFDTMLVKAIQEGKAIPEGADYQKGPRYNLATLREAVFYRDNYTCQVCGRKVADGAILHMHHMFYWKGRHGDSLNELLTVCEKCHTPANHQKGGKLYGFGEDIKFANLSGAAFMNTVRWQIVNELYAAFGKPFVTFTYGAMTKEKRIALHLEKSHNNDAYAMGEFHPNCRCTFEHYEKVRRNNRILEKFYDSRYIDIRTGEIATGKELFNGRINRSHKKDSENLHKYRGKRIRKGYRALRRKKVALNPGDLVSLNGEILTVHGTHTKKNGSVNVEFKTPSKSGKKSTSLKKLKIIKTISPMRSAWDKVS

SEQ ID NO: 19140 - protein, 408 aa, unidentified
MSEYIYVIGVDGDPQMPTKRKRHVEKLLQAGRARVFRQIPFTIQLTYENKPVLQPITIAEDPGRSNIGMAVVSLSGELFSAAVVQTRNKEIVKLMEKRKQHRRASRNGERKARQRLAKKCHTMIKAGSLMRKLPMYGKDKRVQCNVIRNTEARFCNRKREDGWLTPSAEHLVQTHINLIHKMQKFLPITDVAFEINRFAFLSLEDPSISGVDFQNGPLKGYDDLNAAIEDLQDGHCLMCNSPIEHRHHIVPRSMQGSNTIGNIAGLCCKCHERVHKDARFEDRLKKKKAGLNKRYAAVSALNQAIPFICKRLEQEFGKEHVHYCSGRDTSMVRRSFGYHKTKEEQLHEVDAWCIAVLSLRQIPEKAPEFDHVHELLQFRRQDRSRIKSQTSRAYYHEGKKIAKNRKKA

SEQ ID NO: 19141 - protein, 453 aa, unidentified
MSVAVVSKTGMLLMPTSEYRARKLLKSKKAIIHGYHPFTIQLTERETGYIQPVELCMDTGYIHIGTSVKSEKHEYLGEQIDTLTDERQKHDACRMYRRQRRNRKRYRQPRFNNRERDDGRIAPSLEHKKTIHIQALSRICKVIPVTDITLEMGNFDTQVLKAREEGRPLPQGLDYQHGERYSVTTLREAVFLRDGYTCQRCGRTIKDGAILHVHHVVYRSQGGTNRISNLITICDKCHTPANHKPGGKLYGWKPKVASFKGATYMTTIRWKLYNEIKALFPDIDIHITYGAETKERRRAFDITKSHVNDAFVMGQFHPKYRSKPVCYKKKRRNNRCLEKFYDAKYIDSRNGKTRTGQELFNGRISRNHKKDSENLHQYRRQKISTGKRTIRKQHYAIQPHDIVIFNGEKFETSGCHNNGTRVILLPQEKSVAIKKLNIYRYAGGYFKSAFNQK

SEQ ID NO: 19142 - protein, 416 aa, unidentified; identical to SEQ ID NO: 8117

SEQ ID NO: 19143 - protein, 533 aa, Acrocarpospora sp.; identical to SEQ ID NO: 12008

SEQ ID NO: 19144 - protein, 452 aa, unidentified; identical to SEQ ID NO: 3322

SEQ ID NO: 19145 - protein, 428 aa, Oblitimonas sp.; identical to SEQ ID NO: 4442
  source 1..428: note = isolate UBA1343

SEQ ID NO: 19146 - protein, 470 aa, unidentified
MSVFVVGLNGCRLMPVSERKARLLLDGGKASVYRKVPFTIKLNYKTGSTTQPGYLGIDTGSQHIGVSVVREDGTVLHKEEVSLRDSMTKRKLLETKASLRRGRRYRKTRYRHPKWRPKTKRVYSEVPDKKGRHWKKQKNTFTSGRPEGWLPPSLQSKTDHHIRWIRKLQGLLPEGYRLSIELGRFDPARMKDPGIHGDLYQKGPQYDYENVRAYVLDRDRYTCQVCKKKGGKLHVHHILYRSQGASDNPQYMATVCSSCHTTENHLPGGILYQWMLEQKKFTRGLRDATFMNILEKRLRKAFPDAVFTYGNITKVDREVLKLPKSHGNDATAIALVRTGVASVKDKEPVFYIQQVRRKKRSLHEETPRKGRKEPNRTAARNGKNTKAVTFTKRRGGKKTSVTACLFDRVELNGKKGWISGFTGTSCYMKDAEDNYIRTSGKYNQVSLSKLRILHHCGNWVIGARKPLGKG

SEQ ID NO: 19147 - protein, 413 aa, unidentified; identical to SEQ ID NO: 3023

SEQ ID NO: 19148 - protein, 440 aa, Lactobacillus sp.
MKGVQIMQNRVFVINKHGKALMPCKPRKARILLRDGKAKVLKKEPFTIQLLYGSAGYKQDISIGIDSGQRHIGLAVTSQDKVLFQGEVELRQDVKKLIDTRRIYRRSRRNRKTRYRKARFLNRIASKKDNWLPPSVASKVNHNINWIKRLLSVLPKADLHIEVGKFDMQKMKNPEINGEGYQQGDLYGYQTVKQFVLARDNYTCQACKKKGGKLKIHHIIYRSLGGTNTVDNLITVCSKCHTTKNHQTGILAKWCKDKKKVNKSYKGATFMNILRRRLFLAFPQVKFQYGAWTTLQRANLDLTKSHYNDAVAISGIRKIKAKPTSIMMFKQFRKKKRSLHEATARKGRKTPNITSKRNAKNTKYAKGFWLNDYVKIKDSNKKGYISGFMSKGTNVRLRDIFGEYVSNSDKSYTSTKNISLINHSNNWQKQVITEKQYVME

SEQ ID NO: 19149 - protein, 512 aa, unidentified
MSTVYVLNKDGKPLMPTTRCGHVRYLLKEKKARVVKTKPFTIQLLYKTNDVVQPLYLGIDPGRTNIGVAVVKADGTAVFTAHLETRNKEIPKLMKKRKDSRCARRTNGRRCRRQRRAKANGTISKKCVKQATAQNGSASKRAKKIGVIKRHLPGCEKEVLCIGIKNKEAKFNNRTRPAGWLTPTANQLLQTHINLIKKIQKLLPISDVVLEINKFAFMQLDNPNIQKWQYQQGPLYQKANLEEAVSEMQEHHCLFCKKKIDHYHHVVPQHKNGSNTIDNIVGLCTKHHDLVHKDTAWHEKLTKKKTGLNKKYGALSVLNQIIPALTKELSSIFPKHFFVTTGKSTYDYRAAHGVSKDHWLDAYCIACSVLPNDVCNSSINNRVPYELKQFRRHDRRALNNENMSRVYTLNDNVVATNRHKATKQTTDSLEEFRQNHPDDVCKLKVKEHHPTYRNMNRNYPGSVFLIGKQVHVMQGIAGSKDGEATTYKNTNANSIAAGKCKFVAKNSGILFV

SEQ ID NO: 19150 - protein, 424 aa, Planktothrix sp.; identical to SEQ ID NO: 11210

SEQ ID NO: 19151 - protein, 508 aa, unidentified
MGAVFVVDKNGKPLMPTYSKPKVRRMLKDGRAEIFRHEPFTIQLTQRAGGYTQPVHYDTDSGYQYAGVSVKSEKHEFLHMQADMLEDKKGRYDDRRKYRCTRRNRLRHRPPRFDNRRKGEGWIAPSLAHRLENQVRLFQTMCGVCPITEAHIEVGRFDAQALDAVEKGLPLPEGIDYQHGPRYAFDTIREAVFARDQHTCQCCGASPSKKPGTILVVHHALYWKGDHTDRLPGLLTLCTNCHTSANHQKGGKLRGLAPNAATANKAPAAFMNVVRWMMRDRFQADGVPTTITYGAATKRERLSRNVAKTHANDAYCIGEFRPKHRSLEIHIAKRRRDARDGSIKSGKELSSGRTKRKEPRHGAKDLRRFRLKQLTKGCNAVRRKRYEIRPDDLVRTTDGRVYTVNGTQNRGATLQLRTTKTVLLTALVPKTGKEKELLPVETGQKLALKGRKEKHEVLSVDLASGKAVMRWYMGVKPENVTLLTGTYGGWTVVPAQAVNTCKKGETEK

SEQ ID NO: 19152 - protein, 453 aa, Solobacterium sp.; identical to SEQ ID NO: 12809
  source 1..453: note = isolate UBA2929

SEQ ID NO: 19153 - protein, 374 aa, unidentified
MPNKVYVINKHGRPLMPCSPAKARHLLDAGKAKVKKRTPFTIQLVYGSSGYTQEVILGVDAGSKTIGMSASTTKEELLSAEVKPRNDVVDLLSTRREFRRVRRNRKTRYRKPRFDNRVRSKHKEWLAPSVEVKIQEHITSIKRVCRILPVSKVVIETAEFDLQLLKAIADGKSVPQGEDYQKGEMYGHYNVRQYVLWRDNYTCQCCGAHATKKKEVRLHVHHLESRKVGGDAPSNLITLCDSCHEKFHKGIITAANLKKRKRRSMRDATFMGIMRKTLIQRLRAELTIPVAETRGYITKTTREKLLVLPKSHTNDALAIALGKHGFNVGYLPEIAQIDKIYTIRPVRHHNRQLHKVTILKGGIRKSNQAEKYVF

SEQ ID NO: 19154 - protein, 447 aa, unidentified
  source 1..447: note = Firmicutes sp.
MNRNRSPTEAKRKEVSRIVYVLNNDGHPLMSCSAARARHLLKANEAIVVGQEPFTIRLIVGIKNPVVQKVVLGLDMGAKNIGVSAVSQNRVLYQAKIELRDNIRKKMDRRKMFRKNKRSRKCRYRALRFNNRSRKDNWLSPSVKSKVDSMIKVVNLITDILPVSGINVELVNFDTQAIKQNTEKLLAGWMYQRGPLYEEENIKSYIRSLYHYICVYCKKPGDETDHIVPYSKGGTTTVDNLVCACHKCNQDKGNRTAEEFGYPRVQQRVKKSLKAAAHTQMAKTELVKQLRDIAPVKITYGHITKVNRKALGLPKSHSIDAVVIASEGTPVQIPQVEWRGRSIPRGNYRLYKGAHSHIKNQSARILFGFKQWDKVRLSDNQVGFIKGKRSTGYFCVSDIEGNVLNPSINYRCLQLLRKSSGIIWIENKRDNVSSPQINLGVSDAGDC

SEQ ID NO: 19155 - protein, 427 aa, Nostoc sp.; identical to SEQ ID NO: 5922

SEQ ID NO: 19156 - protein, 422 aa, Petrotoga sp.; identical to SEQ ID NO: 6564

SEQ ID NO: 19157 - protein, 379 aa, unidentified
  source 1..379: note = Archaeon sp.
VYLAQYWLITTPLRTNTPARVGQALSVPVINMHGKPLMPTTPGKARILLKHGKATVVQRAPFTIQLCYLNGKYTQDIKLGIDAGYSTIGFSATTDKRELISGELILRKKISKLIDQKRNYRRTRRSRLWHRKPQFNNRSKPKGWLAPSIQHKLETHLRLIKKLKKILPITKITIEVAKFDQQKMNNPEIKNVGYQQGELQGYEVREYLLEKWVRKCVYCGKNNLPLEIEHIIPKIRGGTNRVSNLTLACHRCNQKKGDKTAAEFGYPDIQKKANQTLKSTAFMNIVRKKVVNTLKCAWTYGHITKHDRIKMKLEKSHINDAFVIAGGTTQSRTIPYMTTQTRRNNRSIQTNRKGYKPSIRKQRYKLQPGDLVKYIKSLF

SEQ ID NO: 19158 - protein, 414 aa, unidentified
MVYVINKQGQALMPTERFGKVRRLLKNSLAHVVCRIPFTIQLDYDTTDYTQPVSLGVDAGSKHIGISATTSEKEMYAADVELRNDIVDKLSTRREQRRTRRSRLRYRKARFNNRVSSKRKGWLAPSVENKIQTHLTVVEKIHKFLPITNIVVETASFDIQKINNPSISGVEYQQGEQLDFFNVREYVLFRDNHICQHCKGKSKDKVLNVHHIESRKTGGDSPNNLITLCETCHKAYHRGEFKLNIKRGKSFRDAVFMGIMRWGFYDRLKNIYPNVSMTFGYITKNARITNNLPKEHYVDARCISGNPTAKPLGYYFYQKKVRCQNRQIHKANFLKGGRKKLNQAPFLVKGFRLFDLVEYQKELYYIFGRRSNGSFDIRKLDGTKVNKGSINCKYLRLISTRKSILTEKRTQVNL

SEQ ID NO: 19159 - protein, 414 aa, unidentified; identical to SEQ ID NO: 4524

SEQ ID NO: 19160 - protein, 408 aa, unidentified; identical to SEQ ID NO: 5772

SEQ ID NO: 19161 - protein, 452 aa, unidentified; identical to SEQ ID NO: 3325
  REGION 1..452: note = IscB polypeptide

SEQ ID NO: 19162 - protein, 332 aa, Parasutterella sp.; identical to SEQ ID NO: 9054
  VARIANT 14: note = X can be any naturally occurring amino acid

SEQ ID NO: 19163 - protein, 416 aa, unidentified; identical to SEQ ID NO: 6135

SEQ ID NO: 19164 - protein, 414 aa, unidentified
MPCSPAKARLLLKEKKAIVVRRTPFTIQLTIATGETKQPVSLGVDAGYKHVGLSASTEKAELYASEVELRQDITDLLSARRALRQSRRNRKTRYRAPRFDNRIRTKRKGWLAPSVENRINAHLSRIEAVLRLLPVTKITVETTSFDMQLLKNSDITGKEYQEGEQLGFWNVREYVLFRDGHVCQHCHGRSKDPVLNVHHLESRRTGGDSPGNLITLCETCHKALHRGEITLKAKRGQSFRAETFMGIMRWEVLDRLKASHSKLEVQNTYGYRTKHARISNGIAKSHCADAFCIAGNLGAERLGEFLFQKQTRRNNRQIHKLSILKGGIRKRNQAPFEVKGFRLFDKVACQGEEGFIFGRRSSGYFDVRKLNGTHISAGISCKKLRLLEKRQTYLTEIRKEEALPPLPEGRGLRA

SEQ ID NO: 19165 - protein, 424 aa, unidentified; identical to SEQ ID NO: 8578

SEQ ID NO: 19166 - protein, 420 aa, unidentified
MQYVYVLNKHGEPLMPCSPGKARLLLKQQKACVVKRTPFTIKLLFGSAGYKQPITLGVDAGSKHVGLSASTEKRELYSEEFTPRSDVVELLSTRRQNRRSRRNRKTRYRVPRFDNRVHSKHKGWLAPSVEVKIQEHITVIKHICKILPISLVRVETAEFDTQRLKAMLTGKPLPVGTDYQLGEMYDEYNVRQYVLKRDHYTCQCCGTHNTAKKVVKLHVHHLESRKTGGNAPSNLVTLCTTCHKNLHKGRVTLDGKERGKPLRDAAFMGIMRKTLMVRLKEELPIPVQGTYGYITKMRREQNDIKKSHTNDARCISKHPLAEPCSVCYRTKAIRHHNRQTHKANFSKKGIRKRSQMPYLVEGFRLWDKVLYKGQECFVSGRRSSGSFALKKLDGTSISKGVTFKKLRLLEPATNYLIERM

SEQ ID NO: 19167 - protein, 399 aa, unidentified; identical to SEQ ID NO: 11792

SEQ ID NO: 19168 - protein, 313 aa, unidentified; identical to SEQ ID NO: 12294

SEQ ID NO: 19169 - protein, 456 aa, Fervidobacterium sp.; identical to SEQ ID NO: 2394

SEQ ID NO: 19170 - protein, 411 aa, unidentified
MVYVQDIDGKPMMPTTRHGKVRRLLKDNKAVVVNTYPFTIKLTYKTSDYKQEIVLGVDSGTKHVGLSATTKSKELYASEVILRSDVVDLLSTRRGLRRTRRSRLRYRKQRFNNRVKSKKDGWIAPSVRHKIDSHVRIISFVYSILPVSKLIVEVAQFDTQKIKNPEISGKEYQEGEQLGFWNVREYVLARDGHKCQHCKGKSKDPILNIHHIESRKIGGDSPSNLITLCETCHKEFHKGNIKLKVSRGKSLRDAAVMGIMKWKLYEELKFRYDNVSMTFGYITKYNRINHGIEKSHVSDAFVISRNFNSCRLGYYYKRKLVRRHNRQIHKMKILKGGIRKRNQAPFKVFGFRLFDKVMFQGEEHFIYARRLSGQFNIRDINGENKKDVSCKKLKYVSHGLVSVKTNLFLSQ

SEQ ID NO: 19171 - protein, 441 aa, unidentified
MSVSVFVQDKKHRPLMPCRPARARRLLKSGRARVVRLFPFTIRLTDRLIEDSKLQPVLVKLDPGSRQTGVALVRADEKAHHYALFFVNLVHRGESIRDALTARRNCRRRRRGNLRHRAPRFLNRTKPQGWLPPSLRHRVDTATAWVAKLVKLAPVTGIVEELVKFDTQKLQNPEISGNEYQQGTLFEYEVREYLLEKFGRRCVYCGAENVPLNIDHVVPKARGGSNRISNLVLACVDCNEKKGSQPVEVFLKNRPEVLDRIKRRLKTSLAHAATVNATRWSLFSALKAFGLPVETGSGALTKFNRHTFGVPKEHWLDALCAGRVNGVHYPEGMGILQVRCTGRGNYQRTRVDKYGFPRGYLTRQKRVHGFATGDMVEVVVPSGKKAGTYRGRVAVRKSGYFNIQTPEGVIQGIGWRHCRLLSFNDGYGYAWLRPAPHSSPV

SEQ ID NO: 19172 - protein, 460 aa, unidentified; identical to SEQ ID NO: 7734

SEQ ID NO: 19173 - protein, 473 aa, Marinobacter sp.
VIDIPEGREASASVTRPVRAFIERKTMSVFVLDRRKQPRMPCTEKRARLLLGRRRAVVVRAYPFTIRLKDRTGGDTQPVRIKIDPGSKTTGIAVVRENGQKQHVLVLMELAHRGRQISQSLEQRRAFRRRRRNQLRYREPRFLNRTKPKGWLAPSLQHRVDTTKSLVNRLRSLVLVESISQELVRFDTQKMENPEVSGVEYQQGTLLGYEIREYLLEKWGRECAYCADTDTPLQIEHIDPKANGGSNRISNLTLACRPCNQEKGRHSLADFFASSKRLKNHQARLDRILKQCKKPLRDASAVNSTRWALYQALKQTALPVEVGTGGRTKFNRQRLSIPKTHALDAACVGEVEIVEGWDVPTLAIKSTGRGSYKRTRLTKYGFPRGYLMRQKKVQGFQTGDMVRAVVPTGTKAGTWLGRVAVRKTGSFNIQTSSSAIQGISHRHCVLTQRADGYGYHIQPNQRKEEGDRENESR

SEQ ID NO: 19174 - protein, 415 aa, Bacillus sp.; identical to SEQ ID NO: 16311

SEQ ID NO: 19175 - protein, 434 aa, unidentified
MVFIIDANKQPLAPCHPARARKLLKAGRAAVWRTYPFTIILKEVKEPVLELLETRLKIDYGSRHTGLAILQGNKVVWMAQLDHRTDIKSKLKKRSGYRRRRRSANLRYRKPRFLNRIRPKGWLPPSLQSRVDNIETWIRRLRSVCPITHISYENCKFDTQLMCNPEISGIEYQQGVLQGYEVREYLLAKFSRRCVYCGAEGVPLEVEHLIPKSRPGSSDRVNNLGLACRLCNLKKGAQTAEEFGFLELYEQARKSYTEPAVLNATRWKVYEVLTATSLPVECGTGGRTKMNRIKLGLEKSHCLDACCIGASTPEVLIFKTTSVLYITAKGRGSHCRTNTNDSGFPVSYYARKTQFYGFKTGDMVRAVVSAGLKTSGDWRGRVLCRKTGYFDIKTKKGRICGVSHKYVSLVQNCDGYDYFVATSSPHLKVGASVA

SEQ ID NO: 19176 - protein, 442 aa, unidentified; identical to SEQ ID NO: 3234

SEQ ID NO: 19177 - protein, 470 aa, unidentified; identical to SEQ ID NO: 4092

SEQ ID NO: 19178 - protein, 429 aa, unidentified
MLVYVLKQNGQPFMPTARFGKVRRLLKAKKAKVVRREPFTIKLFYEPETDVIQECYCGVDTGSKHIGVAVVSNDKVLYQSQTELRSDIKRKMDARRMYRYNRRSRKTRYRKPRFLNRGNSTKSDRLPPSVNHKVQAHIDEIEFCKKILPVSDLVVEVSQFDTALMKDPSLINEKVKHWGYQQGFNYGYSSRREAILHRDNYTCQCCGKKNCRLEVHHVKFKSNGGTDDEENLITLCEDCHKGVHAGTVVLNKKPKKSKNLKYATHMSIIRSYLLRKYPNAIETFGFVTSENRNHLKLEKDHYIDACVIASGGLKSKELDVIYRKRRVSIQDRVLTKGVRGEQKLPTGKIFGFKKFDKVEYLGETCFVKGRRSSGSFVLMDIDNNSIDFRDRGGNKEPSYKRIERINTRRSVLCIGKRIEREVGLIPILS

SEQ ID NO: 19179 - protein, 498 aa, unidentified
MPTTRGGHVRHLLKEQKARVVRAKPFTIQLLYETNDVVQPLYLGIDPGRTNIGVAVVKADGTAVFTAHLETRNKEIPKLMKKRKESRRARRTNGRRCRRQRRAKANGTISKKCVKQTTAQNSSVSKRAKEIGAIKRHLPGCKKEILCIGIKNKEAKFNNRTRPEGWLTPTANQLLQTHINLVKKIQKFLPISDVVLEVNKFAFMQLDNPNIQKWQYQQGPLYQKGGLESAVSEMQECHCLFCKKPIDHYHHVVPQHKNGSNTIDNIVGLCTKHHDLVHKDTAWHEKLTKKKTGLNKKYGALSVLNQIIPALTKELSSIFPKHFFVTTGKSTYDYRAAHGVSKDHWLDAYCIACSVLPNDVYDSSINNRVPYELKQFRRHDRRALHKENMNRVYTLNGKKVAANCHKAVEQTTDSLEEFRQNHPDDVCKLKVKEHHPEYRNPKRNFPGCVFLIGKQTHVMQGTNGSHNGKADGYYDTNGNSYPSGKCKFVAKNEGIVFA

SEQ ID NO: 19180 - protein, 512 aa, unidentified; identical to SEQ ID NO: 3720

SEQ ID NO: 19181 - protein, 422 aa, unidentified; identical to SEQ ID NO: 5333

SEQ ID NO: 19182 - protein, 475 aa, unidentified
ARIFRQVPFTIQLTYENEPVLQPVTIAEDPGRSNIGMAVVSLSGELLSAAVVQTRNKEIAKLMEKRKQHRRASRNGERKARQRLAKKCHTMFKAGFLMRKLPMYGKDKRVKCHVIRNTEARFCNRKRKDGWLTPSAEHLVRTHINLVHKMQKFLPITDVAVEINRFAFLSLEDPSVSGVDFQNGPLKGYDNLNAAVEDLQDGHCLMCKDPIEHRHHIVPRSIQGSNTIENIAGLCCKCHEKVHKNAAFEKRLKKKKAGLDKQYAAVSVLNQAIPFICKRLEQEFGKEHVHYCSGRETAMVRRSFGYHKTKEEPLHEVDAWCIAVLSLQQVPEKAPEFDHVHKIMQFRRQDRSRIKAQTSRTYYYEGKKVAKNRKKAEGQKEDSLQEWRECQITLYGEEQARKMTSQLKVRKSIRRYNRLDRLMPGAVFYYKGTRYVMRGQHGNGRYLQAVGMGNKDFPVKDCKIVIQNEGLVFLS

SEQ ID NO: 19183 - protein, 458 aa, unidentified; identical to SEQ ID NO: 6535

SEQ ID NO: 19184 - protein, 462 aa, unidentified; identical to SEQ ID NO: 10791

SEQ ID NO: 19185 - protein, 353 aa, Arthrospira sp.; identical to SEQ ID NO: 3451

SEQ ID NO: 19186 - protein, 421 aa, unidentified
MASMQYVYVLNKHGEPLIPCSPGKARLLLKQQKACVVKRTPFTIKLLYGSAGYKQPITLGVDAGSKHVGLSASTEKRELYREEFTPRNDVVDLLSTRRQNRRSRRNRKTRYRAPRFDNRVHSKHKGWLAPSVEVKIQEHITVIKRICRILPITLVRVETAEFDTQRLKAMLKGKPLPVGTDYQLGEMYDEYNVRQYVLKRDNYTCQCCGAHPTEKKPVRLHVHHLESRHVGGNAPNNLITLCVACHKALHEGKITLDKGKKRGKPLRDAAFMGIMRNTLLARLKDELNIPVKQTYGYITKLLREKNKIPKSHVNDARCIAKAPNAKPCDTMLYTRALRHHNRQIHKAKILNGGIRKKNQAPYLVKGFRLWDKVRYNGEECFITGRRSSGYFALKKYDGTVISNSASYKKLMLLEAATNYIT

SEQ ID NO: 19187 - protein, 416 aa, unidentified
MNQVFVLDTTKQPLNPVHPGYARLLLKQGKAAVYRRYPFTIRLSRRVEQPILSPLRIKVDPGSKTSGLALVNDASGDVVWAAELTHRGEQIKRDLDRRRAIRRKRRQRKTRYRKPRFTNRRKRRGTLPPSLESRVCNVLTWVCRLMKVCPVTNISQELVRFDTQALETPDIEGAQYQRGQLSGYEVREYVLLKWKHQCAYCDARDVPLELDHIDPRSRHGSNRVSNLTLACTPCNQRKSNQDVRQFLRDEPERLARILAQMKAPLRDAEAVNATRWMLNARLKTLGLPVECGSGGRTKCNRITRELPKTHWLDAVCVGRSTPESLIIKNIVPLQIRATGHGSRQMCRMDKYGFPRTGSKQHKRVQGFQTGDLVRAVVTSGTKQGTYVGKVAVRSRGTFNISTAHGVVTDIHHRFCV

SEQ ID NO: 19188 - protein, 322 aa, unidentified; identical to SEQ ID NO: 3988

SEQ ID NO: 19189 - protein, 433 aa, Lactobacillus sp.
MQNRVFVINKHGKALMPCKPRKARILLRDGKAKVLKKEPFTIQLLYGSAGYKPDISIGIDSGQRHIGLAVTSQDKVLFQGEVELRQDVKKLIDTRRIYRRSRRNRKTRYRKARFLNRIAKKKDNWLPPSVASKVNHNINWIKRLLSVLPKADLHIEVGKFDMQKMKNLEINGEGYQQGDLYGYQTVKQFVLARDDYTCQACKKKGGKLKIHHIIYRSLGGTNTVDNLITVCSKCHTTKNHQTGILAKWCKDKKKVNKSYKGATFMNILRRRLYTAFPQAKFQYGAWTTLQRADLELTKSHYNDAVAISGIRKIQAKPTSIMMFKQFRKKKRSLHEATARKGRKTPNITSKRNAKNTKYAKGFWLNDYVKIKDSDKKGYISGFSKTTCYIKDIFGNYLTTSDRYKQVALSKLDRLSHHNNWSKQEINENMYQMG

SEQ ID NO: 19190 - protein, 493 aa, unidentified; identical to SEQ ID NO: 3781

SEQ ID NO: 19191 - protein, 396 aa, unidentified
LLKQKKACVIKRTPFTVKLLHGSAGYKQPVTLGVDAGSKHIGISATTEKHELYREEATPRNDVVDLLSARRAFRRSRRNRKTRYRAPRFNNRVHSKHKGWLAPSVEVKIQEHITLIKHACRILPVTLVRVETAEFDTQRLKAMLEGKPLPVGTDYQLGEMYDEYNVRQYVLKRDNYTCQCCGAHSTKTKGVKLHVHHIETRRTGGNAPNNLITLCKACHKALHAEKVTLDGKKRGKPLKDAAFMGIMRKTLMERLRKELKIPVQGTYGYITKYLREKNGIPKSHTNDARCISKNPLAIPCDTCYYTKAVRHHNRQLHKATILKGGIRKANQAPYIVKGYRLWDKVAYNGTECFITGRRTSGYFALKKLDGTVVSNSISYKKLRLLEAATNYIIERK

SEQ ID NO: 19192 - protein, 392 aa, Anoxybacillus sp.
VVGSASVLHITSIYNMVEENMTCFMQRKGENPMVFVLDTNKRPLAPCHEAVARKLLKQGKAAIYRRFPFTIILKKSVDESEIKATYRLKIDYGSRHTGLAILRGQEVVWLGQLDHRTDIKERIDKRRAFRRARRNRKTRYRKPRFLNRKRKDGWLPPSLESRVQNIQTWVERLRKICPIEHISYENAKFDTQLMRNPEINGVEYQQGTLQGYEVREYLLEKFGRKCCYCGKENVPLEVEHIIPKSRGGTDRVDNLCLACHDCNQRKGSKTAEEFGYPHIQKQVKESLKDASAINSTRWKAYEVLKQTGLDVECGTGARTKMNRIRLDLPKTHYFDACCVGESTTNHLYFKTKEVLFIKAKGRGSRSRTNLDRYGFPRGYLARQKFFFGFQTG

SEQ ID NO: 19193 - protein, 419 aa, unidentified; identical to SEQ ID NO: 3670

SEQ ID NO: 19194 - protein, 431 aa, unidentified
MPNKVYVINKHGRPLMPCSPAKARHLLDAGKAKVKKRTPFTIQLVYGSSGYTQEVILGVDAGSKTIGMSASTTKEELLSAEVKPRNDVVDLLSTRREFRRARRNRKTRYRKPRFDNRVRSKHKEWLAPSVEVKIQEHITAIRRVCGILPVSKVVVETAEFDLQLLKAIADGKPVPQGEDYQKGEMYGHYNVRQYVLWRDDYTCQCCGAHATKKKEVRLHVHHLESRKVGGDAPDNQVTLCESCHEKLHKGLIAEKDFKKRKRRSTRDATFMGIMRKTLMQRLCSELPIPVVKTRGYITKATREKLLVLPKSHTNDALAIAQGKRGFNVGYLPEIAQIDKIYTIRPVRHHNRQLHKATILKGGIRKSNQTEKYVFGYRLFDKVQFNGQDCFIWGRRTTGIFTIKTINGKMIKDGISFKKLKPVEKSTSYLIA

SEQ ID NO: 19195 - protein, 420 aa, unidentified; identical to SEQ ID NO: 3153

SEQ ID NO: 19196 - protein, 450 aa, unidentified; identical to SEQ ID NO: 2935

SEQ ID NO: 19197 - protein, 425 aa, unidentified; identical to SEQ ID NO: 3151

SEQ ID NO: 19198 - protein, 408 aa, unidentified
MVYVQDIDGKPLMPTTRHGKVIQLLKDKKAVVINTCPFTIKLMYKTSDYKQEIVLGVDAGTKHVGLSATTKSKELYSSEVILRSDIVDLLSTRRELRRTRRNRLRYRKPRFDNRIKSKRTGWVAPSVRHRIDAHIRVIDNVCSILPISRIIVEVAQFDTQKIKNPNISGNEYQEGNQLGFWNIREYVLTRDGHKCQHCKGKSKDPILNVHHIESRKTGGDSPSNLITLCETCHKEYHKGKIDLRVKRGKSLRDAAVMGIMKWKLYEELRSRYDNVSMTFGYITKHNRIKYGIEKSHISDAFVISKNFNALMLEYHYKVRLIRRHNRQIHKQKVLKGGVKKPNQSSFEVFGFRLFDRVMFEGNCYFIFGRRKSGSFNIRDIDGGNQRDITYKKLKLLRCKRFMIQKETN

SEQ ID NO: 19199 - protein, 428 aa, unidentified
LKVFVLNMRGQPLMPCSPAKARHLLKAGKAVVRRRTPFTIQLRIATGEMKQSVTLGVDAGAKHVGLSAATEKEEVFASEVELRQDITGLLAARLSLRRDRRHRKTRYRAPRFLNRVRSKHKGWLAPSVENRIQAHMSRIDAICGLLPVTKIVIETASFDIQKIKHPNVEGTDYQQGDQLGFWNVREYVLFRDGHVCQHCHGHSKDKILNVHHLESRQTGGDAPNNLITLCETCHKACHAGKIKLKVKRGQSFRAEAFMGIMRWTLLDRVRKAHPGLPVENTYGYLTKNTRIAMGLPKAHCVDAYCIAGNLKAVRRGVHLYQRQVRKHNRQIHKCTVLSKTLKDGTKIGYRKLNQTPHLVKNFRLFDKVRCLGQTGFIFGRRSSGYFDVRRLDGVKISSCISYRKLTLLEKRSTYLTELRKEDGASSPV

SEQ ID NO: 19200 - protein, 427 aa, unidentified; identical to SEQ ID NO: 3216

SEQ ID NO: 19201 - protein, 415 aa, unidentified; identical to SEQ ID NO: 10543

SEQ ID NO: 19202 - protein, 411 aa, unidentified; identical to SEQ ID NO: 5658

SEQ ID NO: 19203 - protein, 413 aa, unidentified; identical to SEQ ID NO: 3695

SEQ ID NO: 19204 - protein, 461 aa, unidentified
LIRELKGNFMQKLDRRNTYIPVSASQADSSMALSLNREEALSEQSLKTLSNNPEVNQPQCKEGQNLRVSVKVYILNLRGKPLMPCSPREAKKLLREGKAIVIKRFPFTIQLLVTTGETKQKVTLGIDSGFENIGFSAVSETKELISGTVRLDGKTSKRLTERRMYRRNRRNRLWYRKPRFLNRSKPEGWLPPSVQRRYDTHLNLINRLKKILPIQEIIVEIANFDIQKIMTPDISGTDYQQGSLYGYQNMRSYLMAREHGKCQLCGKDFKKQQSHIHHCKQRNESGSNRAENLAILHQKCHEKLHKKGLKLSKPKSYKPNTFMSIIHKKFKQDIPDIVITYGYITFVNRNKLGLEKSHSTDSFVIANGNIQERTKDTDIKQVHRNNRVLQLNRKGFAPSIKREKSKVNPEDLFWVAGKQYICKGMFNKGQYITYGSTKNKEYFKFSQVEKTYSQGSFVWIM

SEQ ID NO: 19205 - protein, 493 aa, unidentified; identical to SEQ ID NO: 2644

SEQ ID NO: 19206 - protein, 407 aa, Succinivibrio sp.; identical to SEQ ID NO: 11987

SEQ ID NO: 19207 - protein, 430 aa, unidentified; identical to SEQ ID NO: 11678

SEQ ID NO: 19208 - protein, 429 aa, unidentified
MPCSPAKARLLLKEKKAIVVRRTPFTIQLTIATGETKQPVSLGVDAGYKHVGLSASTEKAELYASEVELRQDITDLLSARRALRQSRRNRKTRYRAPRFDNRIRTKRKGWLAPSVENRINAHLSRIETVIRLLPVTKISVETTSFDMQLLKNSDTAGKEYHEGEQLGFWNVREYVLFRDGHVCQHCHGRSKDPVLNVHHLESRRTGGDSPGNLITLCETCHKALHRGEIKLKAKRGRSFRAETFMGIMRWGVLNRLKASHPKLEVHNTYGYRTKHARIANGIAKSHCADAFCIAGNFGAKRLGEFFFQKQTRRNNRQIHKLSILKGGIRKRNQAPFEVKGFRLFDKVACQGEEGFIFGRRSTGYFDVRKLDGTCISAGISYKKLHLLEKRRTYLTEIRKEEALPPLPEGRGRPRLNLMNLSTKTTFLFS

SEQ ID NO: 19209 - protein, 431 aa, unidentified; identical to SEQ ID NO: 4306

SEQ ID NO: 19210 - protein, 406 aa, unidentified; identical to SEQ ID NO: 5685

SEQ ID NO: 19211 - protein, 447 aa, unidentified
VPAYRFKHITKKEVPYMVYVLDIDGQPLMPTSRHGKVRRLLNSHLAKVVKRCPFTIQLLYQSTKETQPVSLGVDAGSRHIGLAATTEQKVVYQEELVPRNDVVKLLSARRALRSSRRSRKTRYRKPRFNNRVHSKHKGWLAPSVEVKIQKHITAIKRICQILPISDIHVETAEFDLQRLKAMEEGRLLPAGTDYQLGEQYDFYNTRQYVLHRDEYTCQCCGTHDNNVKLHVHHVESRQTGGEAPNNLITLCEHCHKSIHAGKMMLPKGKKRGKSYRDAAFMGIMRNTLLERLRKEVNVPVTMTYGYITKYWREKAGLEKSHINDAICISKHPYARPLETYYLTKAVRHHNRQIHKTKFSKGGIRKRNQAPYLVKGFRLFDKVLYQGESYFIFGRRITGYFDIRTLDGTKVNKGSTSYKKLRIQDTAEAYLTEVRAIPHMNEFTCVLA

SEQ ID NO: 19212 - protein, 303 aa, unidentified
APSVENRINAHLSRIEAVLRLLPITKITVETASFDMQRLKNPDISGKEYQEGEQLGFWNVREYVLFRDGHVCRHCHGRSKDPVLNVHHLESRRTGSDSPDNLITLCETCHKALHRGEITLKAKRGQSFRAQAFMGIMRREVLNRLKASYPELKVHETYGYLTKHARIANGIVKSHGADAFCIAGNLGAERLGEFFFQKQTRRNNRQIHKLSILKGGIRKRNQAPFEAKGFRLFDKVACQGEEGFIFGRRSSGSFDVRKLDGTRISAGISCKKLRLLEKRRTYLTEIRKEEALPPLPEGRGLRA

SEQ ID NO: 19213 - protein, 406 aa, unidentified
MVYVQDIDGKPLMPTTRHGKVRRSLKANKATVVNPCPFTIQLTYESTDHKRPVTLGIDAGAKHIGFSATTEKEELFACETILRTDIVDLLSTRSQNRRTRRSRLRYRKPKFNNRVFSKKKGWVAPSVKQRIDSHLNEVNEIHKILPITKIVIEAAQFDTHKMKNPNISGIDYQNGEQLGFWNVREYVLFRDGHKCSYCKGKSKDPILNIHHIESRKTGGDSPSNLITLRETCHKEYHKGDIDLKARRGKSLCGAAIMGIMKWRLYDELKSRYSNVSMTFGYITKYNRIKYGIEKSHTSDAFVISKNFNAKRIEYQYLKRLARRHNRQIHKMKILKGGKKKNNQAPFEVFGFRLFDKVLYNNEINFIYGRRKSGNFNIRDFNGENPKDVSYKKLKLIRGKRHPIILK

SEQ ID NO: 19214 - protein, 435 aa, Leptolyngbya sp.; identical to SEQ ID NO: 8219

SEQ ID NO: 19215 - protein, 423 aa, unidentified; identical to SEQ ID NO: 3393

SEQ ID NO: 19216 - protein, 427 aa, Anabaena sp.; identical to SEQ ID NO: 14309

SEQ ID NO: 19217 - protein, 465 aa, unidentified
MSTCVCVLSNNGERLMPTFRLGRVRHLLKDGKAKIIKHHPFTIQLLYDSKTNTQPIEICEDVGYNYIGISVKSQSHEYVSAQYDTLQDEKSCHDACRRMRRTRRNRLRYRQKRFDNRKRDKGWLAPSLKHKKELNVNVIKMYCEVVPITHATVEVGSFDTMLVKAIEEGKATPESADYQKGPRYKLATLREAVFYRDNYTCQVCGRKANEGAILHVHHMFYWKGRHGNSLSELITVCEKCHTPANHQKGGKLYGFGEDIKFANLSGAAFMNTVRWQIVNVLNAAFGKPFVTFTYGAMTKEKRIALHLEKSHNNDAYAMGSFHPVNRCAFEHYEKVKRNNRILEKFYDSQYIDTRTGELTNGKSLFNGRISRSHKKDSENLHKYRGKRIRKGYRALRRKKVALNPGDLVSLNGEILTVHGTHTKKNGSVNVEFKTPSRGGKKSASLKKLKIVKATSSIHPAWEKVS

SEQ ID NO: 19218 - protein, 424 aa, unidentified; identical to SEQ ID NO: 8578

SEQ ID NO: 19219 - protein, 415 aa, unidentified; identical to SEQ ID NO: 2674

SEQ ID NO: 19220 - protein, 508 aa, Erysipelotrichaceae sp.
MHQALQTLAMGATCGGHGQNSVVSVANHQLIEKEASVMKVFVIGRNGLGLMPTKPRLARILLSKGKAIVVKKRPFTIKLLYKTGSATQHCEVGIDTGSQHIGVAIVADDVVLTKEEWELRSSMEKRSLMETRKEYRSGRRYRKTRYRHPKFMPHTKRVYYEKAVTRHGHKTHWIKVKNEFTSYREDGWLAPSLQSKVDHHHRIIDSYLSALPKDTHLNIELARFDTHKAVDPDVTGEGYQYGPLYQQENLKAYVFARDNYTCQICGAKAGRVRKDGSTVKLIGHHINYRSNGTTNNPSGILSVCDKCHTQADHQPGGKLYQLMISNKKIARGLRDMTTVNIVVSQLRKMYPSAFFTYGNYTKANRDLMGLLKSHANDAVAIAKCQDILFTGNLTICDCNGTVYYKQVRRKKRSLHEANPRKGRKTLNRTAKRYSKNTKRVKGYDLYAKVTYDGQLGYISGFTGTSAYIQDWEGRYIRMQNKTYLSIPLSKLHKLDNGHNWLSRFIPSL

SEQ ID NO: 19221 - protein, 415 aa, Bacillus sp.; identical to SEQ ID NO: 2671

SEQ ID NO: 19222 - protein, 421 aa, unidentified
MRGQPLMPCSPAKARHLLKAGKAVVKRRTPFTIQLRIATGETKQNVTLGVDAGAKHVGLSATTEKEEVFASEVELRQDITGLLAARLSLRRDRRHRKTRYRAPRFLNRVRSKHKGWLAPSVENRIQAHMSRIDAVCRLLPVTKIVIETASFDIQKIKDPSVEGTDYQQGDQLGFWNVREYVLFRDGHVCQHCHGRSKDKILNVHHLESRQTGGDAPNNLITLCETCHKAYHAGKIKLKVKRGQSFRAEAFMGIMRWTLLDRVRKAHPKLPVENTYGYLTKHKRIALGLPKTHCADAFCIAGNLKAVRRGVYLHQRQMRKHNRQIHKFTVLSKRLEDGTKIGYRKLNQSPYLVHGFRLFDKVRCLGQIGFIFGRRSSGYFDVRRLDGVKLSPSISWRKLTLLEKRSTYLTELRKQDGASSPV

SEQ ID NO: 19223 - protein, 429 aa, Beggiatoa sp.; identical to SEQ ID NO: 11852

SEQ ID NO: 19224 - protein, 512 aa, unidentified; identical to SEQ ID NO: 4307

SEQ ID NO: 19225 - protein, 415 aa, unidentified
MVYVVANDGQPLMPTERHGKVCRMLKSGMAKVVKKCPFTIQLQYESERNVQPVSLGVDAGSKHIGISATTKTKVLYESDVELRDDIVKLLATRRQLRLSRRSRKTRYRPVRFDNRKRKEGWLAPSIRQKIGSHLTVVANVCKILPINQIIVETASFDIQKIKDPEIQGIEYQQGEQMDFWNIREYVLFRDGHTCQCCKGRSKDKILNVHHIESRKTGGNAPNNLITLCETCHKGYHNGTVILPKNIKHGMQFKDAAFMGIMRWTFYNTLKEQYEPDIPVHYTYGYITKNTRINHNLPKGHCIDARCISGNPDAVSDGTYYYQKKVRCHNRQIHKQTILKGGIRKSNQAEYLVRGFRLFDKVRYQGREYFIFGRRKSGFFDIRTLSGEKVNKGSISVKKLTFADTRKNYLTERRTV

SEQ ID NO: 19226 - protein, 470 aa, unidentified; identical to SEQ ID NO: 8190

SEQ ID NO: 19227 - protein, 421 aa, unidentified; identical to SEQ ID NO: 2846

SEQ ID NO: 19228 - protein, 424 aa, Moorena sp.; identical to SEQ ID NO: 7692

SEQ ID NO: 19229 - protein, 442 aa, unidentified
MSVSVFVLDKRKKPLMPCRPARARKLLNAGRARVVKTYPFTIRLVDRLLENSAVQPVAVKVDPGSEQSGMAVVRDDGKAHHHALFFINLVHRGKVIRDRLTGRRAFRHRRRSANLRYRAPRFLNRKRRKGWLPPSLQHRVDTTMSWVKKLRKLVPVTALWVENVKFDTQKLQNPEVSGVEYQQGTLFGFEVREYLLEKFGRRCVYCGAENTPLNIDHVVPRAKGGSDRVSNLVLACTDCNQKKGAQPLEAFLKDKPQQFERIRRQLKAPLRDAAAVNATRWALFNALKQTGLPVATGTGAQTKFNRKAFGIPKGHWLDALCVGRINGADYPEGMGILQVRCTGRGSYQRTRLNKYGFPRGHLMRQKRVHGFATGDMVKAVVPSGKKAGIHQGRVAVRVTGSFAIQKADGKVDGIHWRHCRLISHNDGYGYAWLRPAPHSSLV

SEQ ID NO: 19230 - protein, 424 aa, unidentified; identical to SEQ ID NO: 3232

SEQ ID NO: 19231 - protein, 396 aa, unidentified
VVRRTPFTIQLTIATGESKQPVSLGVDAGYKHVGLSASTEKAELYASEVELRKDITDLLSARRALRQSRRNRKTRYRAPRFDNRIRTKRKGWLAPSVENRINAHLSRIEAVLRLLPITKITVETASFDMQRLKNPDISGKEYQEGEQLGFWNVREYVLFRDGHVCRHCHGRSKDPVLNVHHLESRRTGSDSPDNLITLCETCHKALHRGEITLKAKRGQSFRAQAFMGIMRREVLNRLKASYPELKVHETYGYLTKHARIANGIVKSHGADAFCIAGNLGAERLGEFFFQKQTRRNNRQIHKLSILKGGIRKRNQAPFEIKGFRLFDKVACKGEESFIFGRRSSGYFDVRKLDGTRISAGISYKKLRLLEKRRTYLTEIRKEEALPPLPEGRGLRA

SEQ ID NO: 19232 - protein, 438 aa, unidentified
MTMVYVQNKDGKPLMPTTRYCYVRLLLKEKKARVVCTTPFTIQLNYDTSDITQDLILGIDPGRTNIGVAVVKENGQCVFSAHLETRNKEVPLLMKKRAAFRRNHRTLDRRRKRQRRAIAAGTTVESNTIERLLPGYEKPVVCHYIRNKEARFNNRSRPVGWLTPTANHLLQTHINLIAKVAKFLPITKVVVELNRFAFMAMDNPNIRRWEYQQGPLYGLGSVDDAVYAQQAGHCLFCKKSIDHYHHVVPRHKGGSETLANRCGLCEKHHDLVHKDKAWAEKLVTRKGGMNKKYHALSVLNQIIPHLMEYLGEETSYDVYATDGRSTKGFRIAKNVPKEHYTDAYCIACSILDANTKVSTPAEPFKLKQFRRHDRQSCIRQMVDRKYILDGKVVATNRHKAIEQKSDSLQEFREVYGDAAVSQLTVRPHSPQYKDMARI

SEQ ID NO: 19233 - protein, 545 aa, unidentified; identical to SEQ ID NO: 10741

SEQ ID NO: 19234 - protein, 521 aa, unidentified
LYIKMTSCTCTVFPAYNYAKASSSQGKHNLLLRQERLIVKEVTYMSTVYVLNKDGKPLMPTTRGGHVRHLLKEQKARVVRTNPFTIQLLYETDNLVQPLYLGIDPGRTNIGVAVVKTDGTAVFTAHLETRNKEIPKLMQGRKKARRARRTNGRRCRRQRRAKANGTISKKCVKQATAQNGSVSKRANEIGVIKRHLPGCEKEVLCIGIKNKEAKFSNRTRPEGWLTPTANQLLQTHINLVKKIQKFLPISDVVLEINKFAFMRLDNPNVQKWQYQQGPLYQKANLEETVSEMQEHHCLFCKKPIDHYHHVVPQHKNGSNTISNIVGLCTKHHDLVHKEAVWQEKLAKKKTGLNKKYGALSVLNQIIPALTKELSSLFPKHFFVTNGKSTYDYRAAHGVSKDHWLDAYCIACSVLPNDTCDKTINSRVPYELKQFRRHDRRALNNENMSRVYTFNGKMVATNRHKATEQTTDSLEEFRQRQPNDVCNLKVKEHHPTYRNMNRNYPGSVFLVGNQVHVMQGIA

SEQ ID NO: 19235 - protein, 431 aa, unidentified; identical to SEQ ID NO: 15055

SEQ ID NO: 19236 - protein, 453 aa, Lactobacillus sp.; identical to SEQ ID NO: 4050

SEQ ID NO: 19237 - protein, 453 aa, unidentified; identical to SEQ ID NO: 5967

SEQ ID NO: 19238 - protein, 465 aa, unidentified
MSTCVCVLSNNGERLMPTIRLGKVRHLLKDGKAKIVKHHPFTIQLLYDSKANTQPIEICEDVGYNYIGISVKSEFHEYVSVQYDTLQDEKDCHDGCRKLRRTRRNRLRYRQARFDNRKRDDGWLAPSLEHKKELNVNVIKMYCKVMPITHAIVEVGSFDTMLVKAIEEGKATPESADYQKGPRYNLATLREAVFYRDNYTCQVCGRKANEGAILHVHHMFYWKGRHGKSHSELITVCEKCHTPANHQKGGKLYGFGEDIKFANLSGAAFMNTVRWQIVNVLYAAFGKPFVTFTYGAMTKEKRIALHLEKSHNNDAYAMGSFHPVNRCAFEHYEKVKRNNRILEKFYDSQYIDTRTGELTNGKSLFNGRISRSHKKDSENLHKYRGKRICKGHRALRRKKVALNPGDLVSLNGEILVVHGTHTKKNGSVNVEFKTPSRGGKKSASLKKLKIVKTSNLMHSAWTKVS

SEQ ID NO: 19239 - protein, 465 aa, unidentified; identical to SEQ ID NO: 2709

SEQ ID NO: 19240 - protein, 411 aa, unidentified; identical to SEQ ID NO: 6901

SEQ ID NO: 19241 - protein, 426 aa, unidentified; identical to SEQ ID NO: 3614

SEQ ID NO: 19242 - protein, 460 aa, unidentified; identical to SEQ ID NO: 5845

SEQ ID NO: 19243 - protein, 414 aa, unidentified; identical to SEQ ID NO: 12795

SEQ ID NO: 19244 - protein, 442 aa, Lactobacillus sp.; identical to SEQ ID NO: 3147

SEQ ID NO: 19245 - protein, 423 aa, unidentified; identical to SEQ ID NO: 8227

SEQ ID NO: 19246 - protein, 459 aa, unidentified; identical to SEQ ID NO: 7794

SEQ ID NO: 19247 - protein, 421 aa, unidentified; identical to SEQ ID NO: 2738

SEQ ID NO: 19248 - protein, 515 aa, unidentified; identical to SEQ ID NO: 11080

SEQ ID NO: 19249 - protein, 515 aa, unidentified
MTALEERLSKTEYIYVLGFDGKPQMPTRRKRHVLKLLKTGRARIAEDIPFTIRLTYRNAPVLQPVTLAEDPGRTNIGAAVLSPLGDLLFAAVIETRNKEIKKLMADRKKSRQASRRGERKARQRLAKRYGSMVKSGMVMRKLPMYAADRFVTCKFIRNTQARFCNRKRCPDWITPTVQHLVQTHLNIIRKISRYLPVTDIAFEVNRFAFIHMENPKAMGVDFQNGPLKGYGDVKEAIRTQQHGKCLMCKKPITHFHHIVPRSRGGSDTIQNLAGLCPECHTKVHTDTTFRKDFDRKKSGQLKKYGALSALNQAVPFICKKLLEEYGEEHVHFCRGLDTSLIRTAFGFEKTKKNQMHEVDAYCIGLAALEVNEVETPAFDHTFQIRQFRRQDRSIIHHQTGRSYYQGKEKVAQNRKPGFEQKTTALSQWYKEQIRIHGEKEAEKLRSQLRVEKSSRHYNDMDRFLPGAVFLYEGKRYVLSGRITNGKYLRACGQGMKNFPAAECTFIRHNAGLVFI

SEQ ID NO: 19250 - protein, 258 aa, unidentified
LKVFVLNMRGQPLMPCSPAKARHLLMDKKAVVKRRTPFTLQLTIATGETKQDVTLGVDAGAKHIGLSASTEKEEVFASEVELRQDITGLLAARLAFRRARRHRKTRYRAPRFLNRVHSKHRGWLAPSVENRIQAHMSRIDAICGLLPVTKIVIETASFDIQKIKNPDVEGTDYQQGDQLGFWNVREYVLFRDGHVCQHCRGRSKDKVLNVHHLESRQTGGDAPNNLITLCETCHKAYHAGKIKLKVKRGQSFRAEAFM

SEQ ID NO: 19251 - protein, 456 aa, unidentified
MAYTYVLDMNKNPLMPCHNGGFIRTLLKEKKAKVVRNKPFTVQLLFEVRNKYKQDMTLGIDAGYKHIGFSVSTSKAEVFSAELEQECGMVERNKERRMYRRQRRSRLRYRKARFNNRIASKQKGWIAPSLKRKRDTHLRFIMMLKSIMPITKITVEIGLFDPALMKAIAEGRTLEGEDYQHGEAEGFENMKSYIRYRDGYTCQNPDCKCHRMSASDKEKLRFAVHHIGYYRNDRSNRPGNLITLCELSHTPENHQPGHLLYGWKPKIKSLKETAFMNIIRKEIVDTLKVIYPTTEIRYTYGYRTNMTRNEWHIKKSHHDDAFCIAGNYSKNRCNTLYFHQKRRNNRSLEIFYDAKYIDGRDGKRKSGKELFCGRTTRNKNYAGENLHKYRLKKISKGKRSIRRQHYFYQPKDIILFEGIKHVIKGSHCNGSRLILDTGKSVSVKKARIHKFSGGIY

SEQ ID NO: 19252 - protein, 456 aa, unidentified
MSTCVCVLSNSGERLMPTFRLGKVRRLLKDGKAKIVKHHPFTIQLLYDSKTNTQPIEICEDVGYNYIGISAKSKSHEYVSAQYDTLQDEKEHHDDCRKMRRTRRNRLRYRKPRFDNRKCDKGWLAPSLEHKKQLNISLIERYVSVIPITHATVEVGSFDTMLLQAIQKGKAKPESADYQKGPHYNLATLREAVFYRDNYTCQVCKRKIADGAILHMHHMFYWKGRHGYQLDELATVCEKCHTPANHQKGGKLFGYGEGKEFADLSGAAFMNAVRWQIVDALYTTYDKEFVTITYGAMTKEKRIALQLEKTHNNDAYAMGDYHPACRCKFRHYQKRRRNNRVLEKFYDATYIDARTGNKAKGKELFNGRINRNHKKDSENLHKYRSKKVSKGRRSIRRRRYAIQSYDTVRLEGKTYITSGCHNKGTRLLIPVNGKSKSVAISKVQVVCHAGAWIQIS

SEQ ID NO: 19253 - protein, 481 aa, unidentified; identical to SEQ ID NO: 10976

SEQ ID NO: 19254 - protein, 412 aa, unidentified; identical to SEQ ID NO: 17658

SEQ ID NO: 19255 - protein, 424 aa, unidentified; identical to SEQ ID NO: 6692

SEQ ID NO: 19256 - protein, 419 aa, unidentified; identical to SEQ ID NO: 6355

SEQ ID NO: 19257 - protein, 430 aa, unidentified; identical to SEQ ID NO: 3328

SEQ ID NO: 19258 - protein, 350 aa, unidentified
LQQTPSQGKHNLLLRQGRLIIKEVAYMSTVYVLNKNGKPLMPTTRCGHIRYLLKEKKARVVASKPFTIQLLYETNDVVQPLYLGIDPGRTNIGVAVVKTDGTAVFTAHLETRNKEIPKLMKKRKDSRRARRTNGRRCRRQRRAKANDTISKKCVKQATAQNGSVSKRAKEIGVIKRHLPGCEKEVLCIGIKNKEAKFSNRTRPEGWLTPTANQLLQTHINLVKKIRKFLPISDVVLEVNKFAFMRLDNPNVQKWQYQQGPLYQKASLEEAVSEMQERHCLFCKKPIAHYHHVVPQSENGSNTIDNIVGLCTKHHDLVHKDTTWQKKLAYITVCTKLLPGLSFKILLQICG

SEQ ID NO: 19259 - protein, 337 aa, unidentified
RREFRRARRNRKTRYRKPRFDNRVRSKHKGWLAPSVEVKIQEHITSIKRVCRILPVSKVVIETAEFDLQLLKAIADGKPVPQGEDYQKGEMYGHYNVRQYVLWRDNYTCQCCGTHPSKKKEVRLHVHHLESRKVGGDAPDNQVTLCESCHEKLHKGLIAEKDFKKRKRRSTRDATFMGIMRKTLMQRLCSELPIPVVKTRGYITKATREKLLVLPKSHINDALAIAQGKHGFNVGYLPGILQIDKIYTIRPVRHHNRQLHKATILKGGIRKSNQTEKYVFGYRLFDKVQFNGQDCFIWGRRTSGYFVVKTIDGKVIHNSASFKKLKLVERASNYLIA

SEQ ID NO: 19260 - protein, 512 aa, unidentified; identical to SEQ ID NO: 2745

SEQ ID NO: 19261 - protein, 433 aa, unidentified; identical to SEQ ID NO: 6602
  source 1..433: note = Microcoleaceae bacterium UBA10368

SEQ ID NO: 19262 - protein, 406 aa, unidentified; identical to SEQ ID NO: 3415

SEQ ID NO: 19263 - protein, 457 aa, unidentified
MDAVAVFSASGKPLMPTNPVRARKLIKKGKAVIYKYRPLFTIRLTERTDGDIQTIEYCCDTGYQHIGLSIKSRKHEYVNERRDLLPNETERHNDSRKYRKARRRRKLRHRACRRDNRHDNQICKDGYAPSIRNKRDQHISLYRSYTEILPVERAVFEMGQFDTQVLKAIEKGEPLPQGKDYQHGERYGYATLREAVFARDDYTCICCGKNAFKDKRILCVHHLGFRIGDRTNRLANLATVCTKCHTPKNHQPKGKLYNLKPELKDFKGATFMTMVRWDMLDKLKVVSKDIQVDVTYGAATKEARRDLKIKKSHANDAYCMGSFHPSHRTDLKRYEKCRRNNRVLSKFYDATYIDIRDGKKKKANALGCNRTKRRESRRSEKNERIYRGEKVSKGRIVLRTKRAVIRPGDIVYVGKKKYIVASSKNLGKQLKLADGSLLTTSKVTKIIHCGGWKTVTL

SEQ ID NO: 19264 - protein, 427 aa, unidentified; identical to SEQ ID NO: 4946

SEQ ID NO: 19265 - protein, 420 aa, unidentified
MQYVYVLSKHGEPMMPCSPGKARLLLKQQKACVVRRTPFTIKLLYGSAGYKQPITLGVDAGSKHVGLSASTEKRELYREEFTPRNDVVELLSTRRQNRRSRRNRKTRYRAPRFDNRVHSKHKGWLAPSVEVKIQEHITIIKRICKILPISLVRVETAEFDTQRLKAMLAGKPLPVGTDYQLGEMYDEYNVRQYVLKRDNYTCQCCGAHTTAKKLVKLHVHHLESRKTGGNAPSNLVTLCTTCHKNLHKGKVTLDGKERGKPLRDAAFMGIMRKTLMARLKEELPIPVQGTYGYITKMRREQNDIKKSHTNDARCISKHPLAEPCSVCYRTKAIRHHNRQTHKANFSKKGIRKRSQMPYLVEGYRLWDKVLYKEQECFVSGRRSSGSFTLKKLDGTSVSKGVTFKKLRLLEPATNYLIERM

SEQ ID NO: 19266 - protein, 418 aa, unidentified; identical to SEQ ID NO: 4341

SEQ ID NO: 19267 - protein, 361 aa, unidentified
SASTEKAELYASEIELRQDITDLLSARRELRRARRNRKTRYRAPRFDNRIRTKRKGWLAPSVENRINAHLSRIEAVLRLLPVTKITVETASFDMQLLKNPDISGKEYQEGEQLGFWNVREYVLFRDGHVCQHCHGRSKDPVLNVHHLESRRTGGDSPGNLITLCETCHKALHRGEITLKAKRGQSFRAEAFMGIMRWEVLNRLKASHPELEVNNTYGYRTKHARISNGIAKSHCADAFCIAGNLGAKRLGEFFFQKQTRRNNRQIHKLSILKHGLRKRNQAPFEIKGFRLFDKVACKGEEGFIFGRRSSGFFDVRKLDGTRISAGISYKKLHLLEKRRTYLTEIRKEEALPPLPEGRGLRA

SEQ ID NO: 19268 - protein, 470 aa, unidentified; identical to SEQ ID NO: 2825

SEQ ID NO: 19269 - protein, 426 aa, unidentified
VSKIFVIDQNKRPLAPIHPAQARQLLKNKKAAIYRQFPFTLILKESRTESPVSLNRLKIDPGAKHTGIALVNETSGEVVFAAELKHRGFAIRDALTSRRQLRRSRRARKTRYRKPRFLNRTRPSGWLAPSLQSRVDNIKTWVDKLRRFAPITSISQELVRFDMQLMRKPDIQGREYQQGTLAGYETREFLLEKWGRQCAYCQVLDVPLQIEHIHPRAKGGSNSISNLTLSCEKCNTKKGARDIKDFLKKDPSKLEKILKQAKRPLADAAAVNTTRFALLEVLKATGLPVETASGGLTKFNRSQHNLVKTHWLDAACVGTTPKLIIKGVKPLLIAANGHGSRQSCRTDKFGFPSRHVPREKIHFGFQTGDIVKSFVTTGKKIGNYVGKVAIRSSGSFNVSTKNGLVQGISHKFCKRIHAKDGYSYAY

SEQ ID NO: 19270 - protein, 545 aa, unidentified
VQFAWWLCHPKPSDNIEDVKHETALMLLQIKAGTETFGTAPCGSGPKAEGVSHERKAMNTVAVVTNTNKPLMPTSPYRARKLLSSGRAKIVKHRPFTILLVNRSDGNVQEIEYKSDTGYLHVGISVCSEKREFVREQRDLLPDEKEKHNDRRKHRRTRRNRKRYRKARFDNRIGKIRKKEKNKHVWLPPSLDHKVDAQVQLFLRLYQVMPIKRAVFEMGQFDPALMKALEKGESAPQGIDYQMGERYQIATRRAAVFTRDRYTCVFCERGIEDHAILHVHHIGFWKQDRSNRLDNLATCCEQCHTSENHRPGGILYGVEPKLKSLASATYMNVVRFELLRRLKEAAPDVEFHISYGAKTSVIRMQRSISKSHTNDAYCLGQYFPKLRAEEIVFQKIRRNDRILQKFYDAEYLDSRDGTTKKGKELTNGRISRNHMKDHKNLHQYRGKKLSKGRITIRRGRSSLKPGSLVRFNGEVLTVHGTHRSRKKNKAGHIKVSVNVEFERPSKTGRKSAALSKCQIISRSYNTGWKKIQLRKEGQGKIAAVG

SEQ ID NO: 19271 - protein, 426 aa, unidentified
MLKPNFVLVIDTNLKPLIPCTPCIARKLLEAGKAAIYRQYPFTIVLKKAVTANPEPIELKLDPGSKVTGIALVQGQKVVFGAELTHRGQAIKMSLESRRAVRMGRRARHCRYRQARFLNRTRPKGWLAPSLAHRVKTTITWVKRFIKLAPIGSIVQELVRFDLQQHENPEISGTEYTQGTLAGFEVREYLLNKWDRKCTYCGIENVPLRIEHIHPKAKGGSNRISNLCLACEKCNLKKGTQDIEQFLSKKPDLLKRIKAQQKRPLKDAAAVNSTRWALFNQLQEAGLPVSTGSGGKTKFNRTRLKLEKTHWLDAACVGDLESLSVLTSQPLRIKATGHGSRQMCRINKYGFPCSKPKQSFTHCKTGDIVSITLTKPKVRFEVGTHKGRVKTPTEHGLEIKIGEYRLVVGDMTSVKFIHKQDGYSYQ

SEQ ID NO: 19272 - protein, 436 aa, unidentified
LTKRTNPSNRSTHIMRVFVLDKNRKPLDPCHPAKARKLLKLGRAKVLRRYPFTIIVQDLDVDNCITHQHQLKIDPGAKTTGLAIVQGDRVIWGAELTHRGEHIREALTSRRQLRRSRRNRKTRYRQPRFLNRTRPKGWLPPSLMSRVHNILTWVNKLIKFCPVTGISQELVRFDTQKMLNPEVSGIEYQQGTLYGYELREYLLEKWNRTCAYCGANNTRLEIEHIKPKSKGGSDRVSNLAIACHNCNQAKGNLEIEEFLSSKPNILKRILSQAKKPLADAAAVNATRWKLHDELKSIGLPVEVGSGGLTKYNRCRQNLPKTHWLDAANVGKVDTLYIEDYQPLLITAKGHGKRQVCGTNKYGFPIRHNSRKKIHKGFQTGDIVRAVVTKGKKIGTYVGRIATRKTGSFDITTAKGRVSGISYKYCQAIHRKDGYSY

SEQ ID NO: 19273 - protein, 415 aa, unidentified
MFVYVISKTGQSLMPTTRFGKVRRLLRDKKAKVVRSCPFTIKLLYEPKTSIVQDVVLGQDTGSKHVGTACITNDKALYQSEVTLRDDIKSKMDNCRGFRRNRRYRKTRYRKPRFLNRINSTKKDRLPPSVQHKVQSHVDEIEFCKKILPISKIVLEVSQFDTQLMEKPWLQKYKWAYQKGVNYGFANARAHALDRDNYTCQCCGKKHVRLEVHHIIFRSQGGSDELENLITLCEKCHSAIHNGKIVLNLKGKQKRNLRHATQMSIIRSQLLKLYPDAEETFGYVTKANAENLGIEKKHYLDACVIASGGKEFKQSNLLFKKRRVARQNRQLCKGIRGEKKLPTGKIFGFKRFDKVKYLGEICFVKGRRSSGAFVLMDIDNNSIDFRDRGGRQNPSYKLLERLNTRRSTLCISQRI

SEQ ID NO: 19274 - protein, 424 aa, unidentified; identical to SEQ ID NO: 5075

SEQ ID NO: 19275 - protein, 512 aa, unidentified; identical to SEQ ID NO: 3741

SEQ ID NO: 19276 - protein, 436 aa, unidentified
MYWLIALNILKKKGSALMVYVLDINGQPLMPTTRHGKVRRLLNGHLAKVVKRCPFTIQLLYQSTKETQSTSLGVDAGSKHIGLAATTEKKVVYQEEFTPRNDVVKLLSARRILRHSRRNRKTRYRKPRFNNRVHSKHKGWLAPSVEIKIQEHITAIKRICQILPISEIHVETAEFDLQRLKALEDGNPLPVGTDYQLGEQYDFYNTRQYVLHRDGYTCQCCGTHDNNVKLHVHHIESRQTGGNAPNNLITLCEHCHKALHEGKIELPKGKKRGKSYRDAAFMGTMRNTLLERLKKEMDIPVMMTYGYITKYWREKTGLEKSHINDAICISKHPYAKPLDTCYLTKAVRHHNRQIHKANFSKGGIRKRNQAPYLVKGFRLFDKVLYQGKECFIFGRRVSGGMDVRLLDGVRINAFVGYKKLKLLESRKAYLIERRTC

SEQ ID NO: 19277 - protein, 423 aa, Moorena sp.
MRVFVLNKNRQPLDPCKPARARIILSTGKAKVYRRYPFTIILTEEIEEPITHTHQLKIDPGAKTSGLAIVQNSRVVWGGELTHRGFQIRDALTSRRQLRRARRNRKTRYRKPRFLNRPWSEGWLAPSLMSRVYNILTWVKKLTRLCPITGISQELVRFDTQKLQNPEISGIEYQQGTLYGYELREYLLEKWNRKCAYCGTTDTQLEIEHIKPKSKGGSDRISNLAIACHSCNQAKSNQEVEHFLSGKPDVLRRVKAQAKRPLADAAAVNATRWKLYHELKSIGLPVEVGSGGLTKFNRCRQNLPKTHWLDAANVGKIETLVIEVTHPLIITAKGHGTRQLCRTNKYGFPIRYCSRTKVHKGFQTGDIVRAVVTKGKKIGTYVGRVATRKSGSFNISTKSGLVQGISHKYCQFIHRKDGYAYTI

SEQ ID NO: 19278 - protein, 431 aa, unidentified
MDAWDIIVVLNKRGKPLMPCSPAKARLLLKEKKAIVKRRTPFTIQLTIATGESKQPVTLGVDAGYKHVGLSASTEKAELYASEVELRQDVSDLLSARRALRQSRRNRKTRYRAPRFNNRLRTKRKGWLAPSVENRINAHLSRIEAVLRLLPVTKITVETASFDLQLLKNPDISGKEYQEGEQLGFWNIREYVLCRDGHVCQHCYGRSKDPVLNVHHLESRRTGGDSPGNLITLCETCHKALHRGEITLKAKRGQSFRAEAFMGIMRWEVQNRLKASHPELEVNNTYGYRTKHARIANDIAKSHCADAFCIAGNLGAERLSEFFFQKQTRRNNRQIHKLSILKGGIRKRNQAPFEVNGFRLFDKVACKGEEGFIFGRRSSGFFDVRKLDGTRISAGISYKKLHLLEKRRTYLTEIRKEEALPPLPEGRGLRA

SEQ ID NO: 19279 - protein, 418 aa, unidentified; identical to SEQ ID NO: 4327

SEQ ID NO: 19280 - protein, 420 aa, unidentified; identical to SEQ ID NO: 4198

SEQ ID NO: 19281 - protein, 503 aa, unidentified
MDTIYVLNRDGRPLMPMHSWGRVQRFLKSGRASVVSSLPFTIRLKKQIEDPELDRCILGIDPGRTNIGLCVTDGKGKPLFASVLETRNKEIPDLMRDRKQARQASRRGERKRRQRRAIHFDKSGETAMTEYWRVLPGTKKAVCQKHIRGQESKFMHWRRPKGWRTPTAEQLYRTHLNAVAKIEKLLPIADIVIEMNRFDFAKMENPGIRNWEYQRGRLFGFKNVQEAVIARQNGKCLLCGRPIEHVHHVRPRSQGGSDHIDNLAGLCCACHQKVHTDPAAKARLASEAKKRLKKYGALSVINQIMPALLDELAYRYLLWITTGWETAKTRRGCGLPEKEKDDGTHYIDAWCIAVSIMENRLYVPDSRDLDDVFHLMRQFRRHDRQKVEATKARSYYLDGRLVAKNRRPRTGQADGKDPKPALSEWRQGHEKDVARLTVRKSTRSYNDLKRVLPGAEVLCDEKRYVVKGKHNDRWIALDAADHTLEKAQSRFTLLHHNTGIVFV

SEQ ID NO: 19282 - protein, 414 aa, unidentified; identical to SEQ ID NO: 4971

SEQ ID NO: 19283 - protein, 535 aa, Streptomyces sp.
MRHVRSLNSNVTHTTPLSPKSLRAPASGATCPRRPHVRVISPDPCSLGNPRCVASGASREGRSLAPSYRVTSPGHHDLRISRGASMTTFFTGEQTHQAVLPQQPALESAGAYTPGSRDETAHGLPDPKPGTGVGHGRGETGAVRTRTRRRHARRLDPGSKATGIAVTDERDEVGAKGRTALVRRGLVSIELRHRGRQIHSGMVRRAGHRRRRRSANLRYRAPRRDNRTRPDGWLPPSLRHRIDSTMSLVARLCRYAPVLEIHVEQVAFDTALIAAAVSSREQDFSERTHAGSEIREFLLAKWERSCAYCGATGVLLNIEHVRPRSRGGSDRVANLVIACVPCNQAKGTARIDEFLADRPARLERVIARLRRPLHDVAAMNTTRLLLVKTLATHGVAVHTWSGGRTSWNRLAMGLPKSHTLDALATGVIDLERGDAVVRIPAQILVVRSTGRGSYARTTPDRYGFPRLQRPGGQHRITTLTSHFDVSHRNLRLLQRADGYTYGFADEIRLSEEHGPAYSGRTLKGGDPGNVRTPDA

SEQ ID NO: 19284 - protein, 470 aa, Blautia sp.; identical to SEQ ID NO: 2925

SEQ ID NO: 19285 - protein, 430 aa, unidentified
LKVFVLNMRGQPLMPCSPAKARHLLKAGKAVVKRRTPFTIQLRIATGETKQNVTLGVDAGAKHVGLSATTEKEEVFASEVELRQDITGLLAARLSLRRDRRHRKTRYRAPRFLNRVRSKHKGWLAPSVENRIQAHLSRIDAICGLLPVTKIVIETASFDIQKIKHPDVEGTDYQQGDQLGFWNVREYVLFRDGHVCQHCHGHAKDKILNVHHLESRQTGGDAPNNLITLCETCHKACHAGKIKLKVKLKRGQSFRAEAFMGIMRWTLLDRVRKAHPDLPVENTYGYLTKNTRITLGLPKAHCVDAYCIAGNLKAVRRGVYLHQRQVRKHNRQIHKCTVLSKTLKDGTKIGYRKLNQTPHLVKNFRLFDKVRCLGQTGFIFGRRSSGYFDVRRLDSVKISSCISYRKLTLLEKRSTCLTELRKEDGASSPV

SEQ ID NO: 19286 - protein, 413 aa, Lactobacillus sp.
MTSYAFVLDANGKPLAPAKEQKAWFLIRKKRAALVSKYPMVIQLKKEIPENEICKDEIRCGIDDGGLHVGIALVQKCKTKNKVVFKGTIEQRNDVKHLMEVRRSYRRYHRYHKRYRPARFDNRKSSKRKKRIAPSILQKRQAIIRVIHWLNKWINITNYWLEDVSIDIRALTDGYKPYRWQYQKSNRLDENIRKAAILRDGGKCMECGKLNCRLEVHHIKPRRRNGSDTLDNLITLCKSCHQKTEGQEELYMDRYFSLLKSSDNKNLNYAQHVMIGKEWLRKQLSSLGVLYLTNGGDTANKRIDWNIEKSHANDAVCITNLQPDTYDMKEWTVKPMRRQSKAKTDNVLGIKHRDLVEYTLKNGETHRGYVTALYPEQKAINFQSPTKHCKKVNARKCKLLWKYSKIYWFENAS

SEQ ID NO: 19287 - protein, 431 aa, unidentified; identical to SEQ ID NO: 13528

SEQ ID NO: 19288 - protein, 431 aa, unidentified; identical to SEQ ID NO: 15228

SEQ ID NO: 19289 - protein, 420 aa, unidentified
MQYVYVLSKHGEPMMPCSPGKARLLLKQQKACVVRRTPFTIKLLYGSAGYKQPITLGVDAGSKHVGLSASTEKRELYREEFTPRNDVVELLSTRRQNRRSRRNRKTRYRAPRFDNRVHSKHKGWLAPSVEVKIQEHITIIKRICKILPISLVRVETAEFDTQRLKAMLAGKPLPVGTDYQLGEMYDEYNVRQYVLKRDHYTCQCCGAHNTAEKVVKLHVHHLESRKTGGNAPSNLVTLCTTCHKNLHKGKVTLDGKERGKPLRDAAFMGIMRKTLMARLKEELPIPVQGTYGYITKMRREQNDIKKSHTNDARCISKHPLAEPCSVCYRTKAIRHHNRQTHKANFSKKGIRKRSQMPYLVEGYRLWDKVLYKEQECFVSGRRSSGSFTLKKLDGTSVSKGVTFKKLRLLEPATNYLIERM

SEQ ID NO: 19290 - protein, 423 aa, unidentified; identical to SEQ ID NO: 3951

SEQ ID NO: 19291 - protein, 499 aa, unidentified
MRYVYVLDVDGKPLMPTCRFGKVRRMLKSGQAKAVDTLPFTIQLTYKPRTRILQPVTLGQDPGRTNIGMAAVRFDGKELGRFHCLTRNKEIPKLMADRMATRRASRRGERLARKRLARKLHTTVKHLEGRMLPGCSEPIAVKDIINTESRFNNRLRPEGWLTPTATQLLRTHINLFRKLSGILPVTDVAVELNKFAFMQLDNPEMKKREIDFCHGPLCGTGGLEAAVKEQQDGKCLLCGKESIGHYHHIVPRSRRGSNTIANIAGLCPKCHELVHKDADTAERLTEMKTGLTKKYGGTSVLNQIIPKLVETLADLFPGHFHVTNGWNTKEFREKHHLEKDHDMDAYCIACSHLKPEETLVETEPFEILQFRKHNRAIIHHQTERTYKLDGVTVAKNRKKRMEQKTDSLEDWYVDMAKEHGKTQADAMRSRLTVIKSTRYYNTPGRMMPGTVFLYEGKRYVMTGQITNGKYYRAYGQEKRNFPAVKVRILTKNTGLVFVA

SEQ ID NO: 19292 - protein, 406 aa, unidentified; identical to SEQ ID NO: 3980

SEQ ID NO: 19293 - protein, 522 aa, unidentified
ALMLLQIKAGTETFGTAPCGSGPKAEGVSPERKAMNTVAVVTNTNKPLMPTSPYRARKLLSSGKAKIVKHRPFTILLVNRSDGNVQEIEYKSDTGYLHVGISVCSEKREFVREQRDLLPDEKEKHNDRRKYRRTRRNRKRYRKARFDNRIGKIRKAEKNKHVWLPPSLEHKVDAQVQLFLRLYQVMPIKRAVFEMGQFDPALMKALEKGEAAPQGIDYQMGERYQIATRRAAAFTRDRYACVFCGRSIKDHAILHVHHIGFWKQDRSNRLDNLATCCEQCHTSENHRPGGILYGVEPKLESLASATYMNVVRFELLQRLKEAAPDVEFHISYGAKTSVIRKQRSISKSHTNDAYCLGQYFPKLRAEEIGFQKIRRNDRILQKFYDAEYLDSRDGTTKKGKELTNGRISRNHMKDHKNLHQYRGKKLSKGRVTIRRGRSSLKPGSLVRFDGEVLTVHGTHRSRRKNKAGHIKVSVNVEFERPSKTGRKSAALSKCQIISQSYNTGWKKIQLRKEEQGKIAAVG

SEQ ID NO: 19294 - protein, 504 aa, unidentified; identical to SEQ ID NO: 3854

SEQ ID NO: 19295 - protein, 420 aa, unidentified; identical to SEQ ID NO: 5136

SEQ ID NO: 19296 - protein, 416 aa, Parasutterella sp.; identical to SEQ ID NO: 10114

SEQ ID NO: 19297 - protein, 417 aa, unidentified; identical to SEQ ID NO: 14385

SEQ ID NO: 19298 - protein, 444 aa, unidentified
MIYVISKDGKPLMPTKRRGKVRHLLKDGKAIIVKYEPFTIQLLYETTDHTQKIILGVDPGSKNLALTAITEKGNILYQAEVTLRTDIKENIRKKRTLRRARKQRKTPYRKRRFLNRKKPQGWLPPSIRARLHTHYQMVKSVASILPVTVIILEVGQFDTQAIINPDIEGTDYQNGQMKGFDSVKEFVKIRDNFTCHYKELRPDIICNDTLVVDHIIPKSKGGTSRPDNLITTCEKHNIEKNNLSYKEFTGKERPAAVSLKETPFMNILKDYLLPQVQHSAPVRYTFGLYTRRKRKEWSLEKSHLNDSIAITGIKPVIYSDTFYSIRQVRKKKRSLHEEIPRKGRSKPNRSSKRNRKNIKSIEHKGFKWSLWDKVYIPELDRTGFISGFTNKWVYIQEIDGSYLQLNGKYKQINPGKIKFICRNNNYIYIENKSNHRKDSPFIST

SEQ ID NO: 19299 - protein, 472 aa, Solobacterium sp.
VVDNRLLSIKPLINIGEGVIYSSICTGLSLQTYQKRKEVPCMVYVLDINGQPLMPTTRHGKVRRLLNSHLAKVVKRCPFTIQLLYQSTKEIQPVSLGVDAGSKHIGMAATTEKKVVYQEELSPRNDVVKLLSLRRASRSSRRSRKTRYRKPKFNNRVHSKHKGWLAPSVEVKIQEHITAIKRICQILPISEIQVETAEFDFQRLKAMKEWKPLPVGTDYQLGEQYDFYNTRQYVLHRDGYTCQCCGTHDNNIKLHVHHIESRQTGGDAPSNLITLCEHCHKALHKGKLELPKGKKRGKTYRDATFMGIMRKTLLERLRKEVDVPVSGTYGYITKYLREKTDLEKSHINDAICISKYPYAKPLDTYYLTKVVRNHNRQIHKSNFSKGGIRKRNQAPYLIKGFRLFDKVLYQGKEYFIFGRRATGYFDIRTLDGTKVNKGSISYKKLRIQDTAKAYLKEARAIPHMNKFTCVLA

SEQ ID NO: 19300 - protein, 424 aa, Moorena sp.
MRVFVLDKNKKPLDPCQPARARILLKQGRAKVFRRYPFTIIMRDLEELECVTHNHQIKLDPGSQTTGLAIVQEKVVVWGAELTHRGLQIRDGLTSRRQLRRSRRNRKTRYRQPRFLNRKRPDGWLAPSLMSRVYNIITWVKKLTRFCPITGISQELVRFDTQKMENPEISGTEYQQGTLYGYEVREYLLSKWNRKCAYCGVTDTPLEVEHIKPKSKGGSDRVSNLAIACRKCNQTKGNQEIEQFLSGKPDVIKRILSQAKRPLVDGAAVNSTRWKLYNELKALGLPIETGSGGLTKYNRCRQNLPKTHWLDAANVGKVDTLYIEVYQPLLISAKGHGTRQMCRTNKFGFPTRYVPRLKFVKGFQTGDIAKAVVTKGKKVGTYTGRIATRKTGSFNISTKHGLVQGISHQYCSIVHRKDGYAYSF

SEQ ID NO: 19301 - protein, 431 aa, unidentified; identical to SEQ ID NO: 9416

SEQ ID NO: 19302 - protein, 415 aa, unidentified
MVYVVANDGQPLMPTERHGKVCRMLKSGMAKVVKKCPFTIQLQYESERNVQPVSLGVDAGSKHIGISATTKTKVLYESDVELRDDIVKLLATRRQLCRSRRSRKTRYRPVRFDNRKRKEGWLAPSIRQKIGSHLTVVANACKILPINQIIVETASFDIQKIKDPEIQGIEYQQGEQMDFWNIREYVLFRDGHICQCCKGRSKDKILNVHHIESRKTGGNAPNNLITLCETCHKGYHNGTVILPKNIKHGMQFKDAAFMGIMRWTFYNTLKEQYEPDIPVSMTYGYLTKNTRIEHGLPKEHYIDARCISGNPDAVSDGTYYYQKKVRCHNRQIHKQTILKGGIRKSNQAEYLVKGYRLFDKVRYQGREYFIFGRRKSGFFDIRTLSGEKVNKGSISVKKLTFADTRKNYLIERRTV

SEQ ID NO: 19303 - protein, 450 aa, unidentified; identical to SEQ ID NO: 10517

SEQ ID NO: 19304 - protein, 522 aa, unidentified; identical to SEQ ID NO: 16031

SEQ ID NO: 19305 - protein, 418 aa, unidentified; identical to SEQ ID NO: 5883

SEQ ID NO: 19306 - protein, 415 aa, unidentified; identical to SEQ ID NO: 10543

SEQ ID NO: 19307 - protein, 421 aa, unidentified; identical to SEQ ID NO: 2902

SEQ ID NO: 19308 - protein, 413 aa, unidentified
MTSYAFVLDANGKQLAPAKEQKAWFLIRKKRAALVSKYPMVIQLKKEIPENEICKDEIRCGIDDGGLHVGIALVQKCKTKNKVVFKGTIEQRNDVKHLMEVRRSYRHYHRYHKRYRPARFDNRKSSKRKKRIAPSILQKRQAIIRVIHWLNKWINITNYWLEDVSIDIRALTDGYKPYRWQYQKSNRLDENIRKAAILRDGGKCMECGKLNCRLEVHHIKPRRRNGSDTLDNLITLCKSCHQKTEGQEELYMDRYFSLLKSSDHKNLNYAQHVMIGKEWLRKQLSSLGVLYLTNGGDTANKRIDWNIEKSHANDAVCITNLQPDTYDMKEWTVKPMRRQSKAKTDNVLGIKHRDLVEYTLKNGETHRGYVTALHPEQKAINFQSPTKQCKKVNARKCKLRWKYSKIYWFENAS

SEQ ID NO: 19309 - protein, 465 aa, unidentified
MNTCVCVLGNNGERLMPTFRLGKVRRLLKDGKAKIVKHHPFTIQLLYDSKTNTQPIEICEDVGYNYIGISVKSKSHEYVSAQYDTLQDEKEHHDDCRMHRRTRRNRLRYRKPRFDNRKRGEGWLAPSLMHKKELNVNVVKMYCAVMSITHATVEVGSFDTMLVKAIQEGKVIPEGADYQKGPRYNLATLREAVFYRDNYVCKICGRKATEGAILHMHHMFYWKGRHGNSLDELLTVCEKCHTPANHQKGGKLYGFGEDVKFADLSGAAFMNTVRWQIVNELYVAFGKPFVTITYGAMTKEKRIALQLEKSHNNDAYAMGEFHPNLRCMFEHYEKARRNNRILEKFYDSRYIDIRTGEIATGKELFNGRINRNHKKDSENLHKYRGKRTYAGHRALLRKKVNLNPGDLVSLNGENLIVHSTHTKKNGSVNVEFKTPSRGGKKSASLKKLKIVKTSNLMHSAWTKVA

SEQ ID NO: 19310 - protein, 434 aa, unidentified; identical to SEQ ID NO: 6862

SEQ ID NO: 19311 - protein, 434 aa, unidentified
MQNYVFVVDKNVVPLNPIRPKRARQLLNQNKAAVLRPFPFTLILKQEISNANIHPLTLKIDPGSKTTGFALLDGDKVVWLGELEHRGQRIKDSLEKRRTIRRNRRSRKTRYRKARFLHRTGSIRPLPPSVHHRALTVETWLKRFTRFVPINKIAIEQVKFDMAKMQNAEITGVEYQQGTLWGYEVREYLLEKWGRECTYCGKKDVPLQIEHIVPKSKGGSNRVSNLCLACEECNQKKGNKPVEEFLKNKLEKLKKIKSKMKTPLKDAAAVNASRNKLAWICEFIISGITGKRSDCEVGTGAQTKYNRTRLGLPKEHSIDAACVGSVDTLEFRTSQPLLIKAAGHRNKQYVRMNKFGFPASKPRKKYDIGWKTGDIAISINKGVKCLGRVLINDAKRFEMPINGKRISGKYGELTKLHRSDGYSYSFSANYSVSP

SEQ ID NO: 19312 - protein, 509 aa, unidentified
MVLTYVLSVDGKPLMPTTRCNRVAWLLKHSMAKVVSKNPFTIRLAYDTPDITQSLILGIDPGRTNIGLTVIRETGESVYTAHLETRNKKIPKLMKARKQFRTERRTLKRRRKRQCRAIASNTVSPKCVKTSNSQNSNESKKGMKQGVLERLLPGCDTPILCIGIKNKEARFDNRIRKTGWLTPTANHLLQTHLNAMNKICKILPVTKTVLEINKFAFMQLDNPCVKKWQYQRGQLFGYGSVEEVVYEQQNSHCLFCDKAIDHYHHVVPRSKRGSETLANRVGLCAEHHTLVHNDEKWNTKLIAKKQGMNKQYHALSVLNQIIPALSNALAKLFPDRFYATSGKSTYTFREAYGINKDHHIDAYCIAASILPDVNVKLSQTVYEIKQFRRHDRQVCHKANLNRRYALNGKVVATNRHKAMNQKTDSLEEYTTNGGKTENLTVIEHKAQYKRLDRIMPGAIFELDNKRKVMFKTDGFHNNQSDYVCFIDGSKIGYSKCNKPVTLNSGLVYC

SEQ ID NO: 19313 - protein, 465 aa, unidentified
MSTCVCVLSNNGERLMPTIRLGKVRHLLKDGKAKIIKHHPFTIQLLYDSKTNTQPIEICEDVGYNYIGISVKSESHEYVSAQYDTLQDEKEHHDDCRKYRRTRRNRLRYRKPRFDNRKRSEGWLAPSLEHKKELNVNVIKMYCKVMPITHAIVEVGSFDTMLVKAIEEGKATPESADYQKGPRYKLATLREAVFYRDNYTCQVCGRKANEGAILHVHHMFYWKGRHGNSLSELITVCEKCHTPANHQKGGKLYGFGEDIKFANLSGAAFMNTVRWQIVNVLYAAFGKPFVTFTYGAMTKEKRIALHLEKSHNNDAYAMGSFHPVNRCAFEHYEKVKRNNRILEKFYDSQYIDIRTGEIATGKELFNGRISRSHKKDSENLHKYRGKRICKGHRALRRKKVALNPGDLVSLNGEILVVHGTHTKKNGSVNVEFKTPSRGGKKSASLKKLKIVKTSNLMHSAWTKVA

SEQ ID NO: 19314 - protein, 412 aa, unidentified; identical to SEQ ID NO: 14433

SEQ ID NO: 19315 - protein, 413 aa, Petrotoga sp.; identical to SEQ ID NO: 16705

SEQ ID NO: 19316 - protein, 414 aa, Parasutterella sp.; identical to SEQ ID NO: 11858

SEQ ID NO: 19317 - protein, 421 aa, unidentified
MFVYVLDKNGQPLMPTPRFGKVRRLLRDKKAKVVKRCPFTIRLLYEPETKIVQDIVLGVDTGSKYVGVACVGNSKVLYQSQIELRDDIERKMDSRRMYRRSRRNRKTRYRKPRFLNRRNSIRKDRYCPTIVSKYYSHEREIEFCKKILPIKDIVLEAEKFDTQLMEKPWLQEHKWAYQKGVNYGYANAREHALVRDSYTCQCCGKKNCRLEVHHIKFRSEGGSDTLENLITLCEDCHKAVHLGKITLKLKGKHKSNLRHAAQMSIIRSKLLKKYSDAIETFGFVTKANRENLSLKKDHYLDACVIASGGLEFELSDVLYRKRCVPVQNRVLTRGIRSERKIPTGKVHGFKRYDKVEYLGKVCFVKARRTKGDFVLMDIGNNSIDFRVIGGCQNPSHKKIKRLNTRRGVICIIQKVQNREER

SEQ ID NO: 19318 - protein, 457 aa, unidentified; identical to SEQ ID NO: 9139

SEQ ID NO: 19319 - protein, 439 aa, Halomonas sp.
MPCSEKRARLLLERGRAVVVNLTPFVIRLRDRCLSDCALQPTLLGIDPGSKETGLALMRLEENATDEQAPATRHVLCLFQLVHRGFQIRQALEQRAGFRRRRRSKNLRYRQPRFDNRTRKKGWLPPSLQHRVDTTMAWVDKLCRWAPVTHLSMELVRFDLQKMENPEISGIEYQQGTLLGYEVREYLLEKWGRECAYCGTGDTPLEIEHVVAKSRNGSSRVANLTVACHDCNQAKDSQWLADFFATNKGLKKRLKANGLSADVRLEHVQRQLKLPLLDAAAVNATRWALYGSLKTTGLPVTVGSGGRTKYNRQRLGIPKTHALDAACVGKFDTLKGWRVPTQVIKAMGRGSYQRTRLDKYGFPRGYLMRQKQVQGFQTGDRVRAIVPAGKKAGTHTGRVAIRKTGSFNIQTEQGAVQGISWRYCTLLQRGDGYGYHPLP

SEQ ID NO: 19320 - protein, 447 aa, unidentified; identical to SEQ ID NO: 5316

SEQ ID NO: 19321 - protein, 499 aa, unidentified
MRYVYVLDVDGKPLMPTCRFGKVRRMLKSGQAKAVDTLPFTIQLTYKPRTRILQPVTLGQDPGRTNIGMAAVRFDGKELGRFHCLTRNKEIPKLMADRMATRRASRRGERLARKRLARKLHTTAKHLEGRMLPGCSEPIAVKDIINTESRFNNRLRPEGWLTPTATQLLRTHINLFVRLAKILPVTDVAIELNKFAFMQLDNPEMKKREIDFCHGPLYGTGGLEATVKEQQDGRCLLCGKESIGHYHHIVPRSRRGSNTIANIAGLCPKCHELVHKDADTAERLTEMKTGLTKKYGGTSVLNQIIPKLVETLADLFPGHFHVTNGWNTKEFREKHHLEKDHDVDAYCIACSHLKPEETLVETEPFEILQFRKHNRAIIHHQTERTYKLDGVTVAKNRKKRMEQKTDSLEDWYVDMAKEHGKTQADAMRSRLAVIKSTRYYNTPGRMMPGTVFLYEGKRYVMTGQITNGKYYRAYDQEKRNFPAVKVRILTKNTGLVFVA

SEQ ID NO: 19322 - protein, 377 aa, unidentified
LYSQSKIAQSAQEYGVCRGGIENRRSRRNRKTRYRPPRFDNRVHSKHKGWLAPSVEVKIQEHITVIKRICRILPITLVRVETAEFDTQRLKAMLEGKPLPVGTDYQLGEMYDEYNVRQYVLKRDNYTCQCCGAHTTAKKAVKLHVHHLESRKMGGNAPGNLITLCITCHDALHKGKVSLDNKKRGKPMRDAAFMGIMRRTLMSRLREELPITVQGTYGYITKMQREQNDIKKSHVNDARCISKHPLAEPCSVCYRTKAIRHHNRQTHKANFSKGGIRKRSQMPYVVEGYRLWDKVLYKDRVTSEAMNVIADNTELAENFAETVKHEIETDDDTYAHIGFHLANNIRNQSPASEVLLTLCGWTIETLLDKTPPIAIED

SEQ ID NO: 19323 - protein, 450 aa, unidentified; identical to SEQ ID NO: 2935

SEQ ID NO: 19324 - protein, 426 aa, unidentified; identical to SEQ ID NO: 9916

SEQ ID NO: 19325 - protein, 304 aa, unidentified
LAPSVENRINAHLSRIEAVLRLLPVTKITVETASFDLQLLKNPDISGKEYQEGEQLGFWNIREYVLCRDGHVCQHCYGRSKDPVLNVHHLESRRTGGDSPGNLITLCETCHKALHRGEITLKAKRGQSFRAEAFMGIMRSEVLNRLKASHPELEVNNTYGYRTKHARIANDIAKSHCADAFCIAGNLGAERLGEFFFQKQTRRNNRQIHKLSILKGGIRKCNQAPFEVNGFRLFDKVACKGEEGFIFGRRSSGFFDVRKLDGTRISAGISCKKLHLLEKRRTYLTEIRKEEALPALPEGRGLRA

SEQ ID NO: 19326 - protein, 423 aa, unidentified; identical to SEQ ID NO: 9986

SEQ ID NO: 19327 - protein, 406 aa, unidentified; identical to SEQ ID NO: 2973

SEQ ID NO: 19328 - protein, 420 aa, unidentified
MQYVYVLNKHGEPLMPCSPRKARLLLKQKKAYVIKRTPFTVKLLYGSAGYKQPVTLGVDAGSKHIGISATTEKHELYREEATPRNDVVDLLSARRAFRRSRRNRKTRYRAPRFNNRVHSKHKGWLAPSVEVKIQEHITLIKHACRILPVTLVRVETAEFDTQRLKAMLEGKPLPVGTDYQLGEMYDEYNVRQYVLKRDNYTCQCCGAHSTKTKGVKLHVHHIETRRTGGNAPNNLITLCKACHKALHAEKVTLDGKKRGKPLKDAAFMGIMRKTLMERLRKELKIPVQGTYGYITKYLREKNGIPKSHTNDARCISKNPLAIPCDTCYYTKAVRHHNRQLHKATILKGGIRKANQAPYIVKGYRLWDKVAYNGTECFITGRRTSGYFALKELDGTVVSNSISYKKLRLLEAATNYIIERK

SEQ ID NO: 19329 - protein, 451 aa, unidentified; identical to SEQ ID NO: 5203

SEQ ID NO: 19330 - protein, 457 aa, unidentified
VWLYQAVYNLGEGFLPSSEERTAFYWLLIYRKEHGIMQYVYVLNKHGEPLMPCSPGKARLLLKQQKACVVKRTPFTIKLLYGSAGYKQPITLGVDAGSKHVGLSASTEKRELYREEFTPRNDVVDLLSTRRQNRRSRRNRKTRYRAPRFDNRVHSKHKGWLAPSVEVKIQEHITVIKRICRILPITLVRVETAEFDTQRLKAMLKGKPLPVGTDYQLGEMYDEYNVRQYVLKRDNYTCQCCGAHPTEKKPVRLHVHHLESRHVGGNAPNNLITLCVACHKALHEGKITLDKGKKRGKPLRDAAFMGIMRDTLLARLKDELNIPVKQTYGYITKLLREKNKIPKSHVNDARCIAKTPNAKPCDTMLYTRALRHHNRQIHKAKILNGGIRKKNQAPYLVKGFRLWDKVRYNGEECFITGRRSSGYFALKKYDGTVISNSASYKKLMLLEAATNYITERS

SEQ ID NO: 19331 - protein, 406 aa, unidentified; identical to SEQ ID NO: 7944

SEQ ID NO: 19332 - protein, 391 aa, unidentified
MPNKVYVINKHGRPLMPCSPAKARHLLDAGKAKVKKRTPFTIQLVYGSSGYTQEVILGVDAGSKTIGMSASTTKEELLSAEVKPRNDVVDLLSTRREFRRVRRNRKTRYRKPRFDNRVRSKHKEWLAPSVEVKIQEHITSIKRVCRILPVSKVVIETAEFDLQLLKAIADGKSVPQGEDYQKGEMYGHYNVRQYVLWRDNYTCQCCGAHATKKKEVRLHVHHLESRKVGGDAPSNLITLCDSCHEKFHKGIITAANLKKRKRRSMRDATFMGIMRKTLIQRLRAELTIPVAETRGYITKTTREKLLVLPKSHTNDALAIALGKHGFNVGYLPEIAQIDKIYTIRPVRHHNRQLHKVTILKGGIRKSNQAEKYVFGYRLFDKVQFNGQDCFI

SEQ ID NO: 19333 - protein, 423 aa, unidentified; identical to SEQ ID NO: 8227

SEQ ID NO: 19334 - protein, 424 aa, unidentified
MSNYVFVIDPDKQPCNPVHPAKAQLLLNQKKAAVFRRYPFTIILNEKQKDVEANPLTLKIDPGSQTTGIAILNGENVVWGAELAHRGQQIKSDLESRRAIRRNRRNRKTRYRPARFLNRKREKGWLAPSLQHRVDTTLTWIKKLIRYCPVTNIVQELVRFDLQKMENPEISGIEYQQGELQGYEVREYLLEKWNRQCAYCGAKNIPLQIEHIHPKSKGGTNRISNLCITCEPCNLAKGTQDIKDFLSGKPSILKRVLSQAKSPLKDAAAINSTRWALLNALKSIGLPISTGSGGQTKFNRTRLNLPKTHWIDAACVGTIESLRIITKQPLLIKATGHGCRQMCRTDKFGFPSRYVPRLKFIKGFQTGDIVKAIVTSGKKIGTYVGRVAVRCSGSFNISTPQLIQGIGHKYCRAIHRKDGYSYSF

SEQ ID NO: 19335 - protein, 418 aa, unidentified; identical to SEQ ID NO: 4950

SEQ ID NO: 19336 - protein, 415 aa, unidentified; identical to SEQ ID NO: 3582

SEQ ID NO: 19337 - protein, 247 aa, unidentified
MQYVYVLNKHGEPLMPCSPRKARLLLKQKKACVVKRTPFTIKLLYGSTGYKQPITLGVDAGSKHIGISATTEKHELYREEATPRNDVVDLLSARRAFRRSRRNRKTRYRAPRFNNRVHSKHEGWLAPSVEVKIREHITLIKRVCRILPVTLVRVETAEFDTQRLKAMLEGKPLPVGTDYQLGEMYDEYNVRQYVLKRDNYTCQCCGAHSTKTNCMCIILRPVEQVAMRQTTLSRYAQIVTKRFMPER

SEQ ID NO: 19338 - protein, 422 aa, unidentified
MRGKPLMPCSAAKARILLKEKKAAVARRTSFTIRLTTAGGESKQPVSLGVDAGYKHVGLSASTEKAELYASEIELRQDITDLLSARLALRRARRSRKTRYRAPRFDNRVRSKRKGWLAPSVENRIAAHLSRIEAVLRILPVTKITVETASFDMQLLKNPDISGKGYQQGEQLGFWNVREYVLFRDGHVCRHCGGRSKDPVLNVHHLESRRTGGDSPGNLITLCETCHKALHRGEIKLSIKRGASFRAEAFMGIMRWKVLDRLKAAHPELEVRNTYGYLTKHARIEHGIAKSHCADAFCIAGNLKADRLGSFYYQKQTRRHNRQIHKLSILKGGVRKRNQAPYEVKGFRLFDKVACKGETAFIFGRRSTGSFDVRKLDGTRISAGISFKKLRLHERRRTYLTELRKEAALPPLPEGRGLRADF

SEQ ID NO: 19339 - protein, 428 aa, unidentified
LKVFVLNMRGQPLMPCSPAKARHLLKAGKAVVKRRTPFTIQLRIATGETKQNVTLGVDAGAKHVGLSATTEKEEVFASEVELRQDITGLLAARLSLRRDRRHRKTRYRAPRFLNRVRSKHKGWLAPSVENRIQAHMSRIDAVCRLLPVTKIVIETASFDIQKIKDPSVEGTDYQQGDQLGFWNVREYVLFRDGHVCQHCHGRSKDKILNVHHLESRQTGGDAPNNLITLCETCHKAYHAGKIKLKVKRGQSFRAEAFMGIMRWTLLDRVRKAHPGLPVENTYGYLTKNTRITLGLPKAHCVDAYCIAGNLKAVRRGVYLHQRQVRKHNRQIHKCTVLSKTLKDGTKIGYRKLNQTPHLVKNFRLFDKVRCLGQTGFIFGRRSSGYFDVRRLDGVKLSSGISYRKLTLLEKRSTYLTELRKEDGASSPV

SEQ ID NO: 19340 - protein, 465 aa, unidentified
MSTCVCVLSNSGERLMPTFRLGKVRRLLKDGKAKIVKHHPFTIQLLYDSKANTQPIEICEDVGYNYIGISVKSQSHEYASAQYDTLQDEKACHDSCRKLRRTRRNRLRYRKPRFDNRKRGESWLAPSLRHKKELNVNVVKMYCAVMPITHATIEVGSFDTMLVKAIQEGKAIPEGADYQKGPRYNLATLREAVFYRDNYVCKVCGRKATEGAILHVHHMFYWKGRHGNSLSELITVCEKCHTPANHQKGGKLYGFGEDIKFANLSGAAFMNTVRWQIVNVLYAAFGKPFVTFTYGAMTKEKRIALHLEKSHNNDAYAMGSFHPVNRCAFEHYEKVKRNNRILEKFYDSQYIDIRTGEIATGKELFNGRISRSHKKDSENLHKYRGKRICKGHRALRRKKVALNPGDLVSLNGEILVVHGTHTKKNGSVNVEFKTPSRGGKKSASLKKLKIVKTSNLMHSAWTKVA

SEQ ID NO: 19341 - protein, 414 aa, unidentified
MPCSPAKARLLLKEKKAIVVRRTPFTIQLTIATGETKQPVSLGVDAGYKHVGLSASTEKAELYASEVELRQDITDLLSARRALRQSRRNRKTRYRAPRFDNRISTKRKGWLAPSVENRINAHLSRIEAVLRLLPVTKITVETASFDLQLLKNPDISGKEYQEGEQLGFWNIREYVLCRDGHVCQHCYGRSKDPVLNVHHLESRRTGGDSPDNLLTLCETCHKALHRGEITLKTKRGQSFRAETFMGIMRWEVLNRLKASHSELKVHNTYGYLTKHARIENGIAKSHGADAFCIAGNLGAERLGEFFFQKQTRRNNRQIHKLSILKGALRKRNQASFEVKGFRLFDKVACQGEEGFIFGRRSSGFFDVRKLDGTRISAGISYKKLHLLEKRQTYLMEIRKEEAFPPLPEGRGLRA

SEQ ID NO: 19342 - protein, 406 aa, unidentified; identical to SEQ ID NO: 2874

SEQ ID NO: 19343 - protein, 430 aa, unidentified; identical to SEQ ID NO: 3328

SEQ ID NO: 19344 - protein, 430 aa, unidentified
MPKVYVLNRHGRPLMPCTPAKARHLLDAGKAKVRHRTPFTIQLLYGSTGYTQEVILGVDAGSKTIGLSAATETEELFSAEVKPRNDVVELMSARRQFRRARRNRTTRYRKPRFDNRVRSKHKGWLAPSVEVKIQEHMTAIRRACAILPVSKVVVETAEFDLQLLKAVAEGKPVPQGEDYQKGEMYGHYNVRQYVLWRDSYTCRICGVHGSVRKGVPLHVHHLESRRVGGDAPDNLVTLCTACHDKLHKGIIMAADIKKRKRRSTRDATFMGIMRMTLLRRLREQLPVPVVETRGYITKATRENLLVLPKSHANDALAIAHGPQGFRAEYLPNIRQADRLYTIRPVRHHNRQLHKATILKGGVRKANQAEKYICGFRLYDKVLYNGIECFVWGRRTSGSFLLRQLNGEKVKDGVSYKHLKLLERSQSYLVA

SEQ ID NO: 19345 - protein, 451 aa, Blautia sp.; identical to SEQ ID NO: 5203

SEQ ID NO: 19346 - protein, 434 aa, unidentified
PGRTNIGVAVVKEDGSCVFSAHLETRNKEVPLLMKKRAAFRRNHRTQDRRRKRQRRAIAAGTTVTEGSVERLLPGYEKPVVCRYIRNKEARFNNRSRPAGWLTPTANHLLRTHINLIAKVAKFLPITKVVVELNRFAFMAMDNPNIRRWEYQQGPLYGLGSVEDAVYAQQDGHCLFCKKPIDHYHHVIPRRKNGSETLANWCGLCAKHHDLVHKDKVWADKLVTRKEGVNKKYHALSVLNQIIPHLLEYLGDETLYDIYATNGRSTKGFRIAKNVPKEHYTDAYCIACSILDTDIKVSAPVEPFELKQFRRHDRQACIRQMVDRKYLLDGKVVAANRHKAIEQKSDSLAEFREACGAAVVSQLTVKPHPPQYKDMARIMPGAVMDFGGAVGILQGSEGFHNGKPDYYKSTKGERVLTRRCALLAQNAGTVFIPA

SEQ ID NO: 19347 - protein, 427 aa, Parasutterella sp.; identical to SEQ ID NO: 6030

SEQ ID NO: 19348 - protein, 411 aa, unidentified; identical to SEQ ID NO: 13760

SEQ ID NO: 19349 - protein, 415 aa, Bacillus sp.; identical to SEQ ID NO: 2431

SEQ ID NO: 19350 - protein, 557 aa, Blautia sp.; identical to SEQ ID NO: 7395

SEQ ID NO: 19351 - protein, 408 aa, unidentified; identical to SEQ ID NO: 3257

SEQ ID NO: 19352 - protein, 416 aa, Parasutterella sp.; identical to SEQ ID NO: 10114

SEQ ID NO: 19353 - protein, 476 aa, unidentified
LEAADTEGVSHPGLPGKYKNKGGQLMSVAVISKTGERLMPTSEYRARKLLKSGKAIKHSYHPFTIQLTERKTGDIQPIELCMDTGYIHIGISVKSEKHEYLAEQIDTLTDERGRHDACRMYRRQRRSRKRYRQARFNNRKRDQGWIAPSLEHKKKIHIQAISRINNVMPITDITLEMGNFDTQVLKAKEEGKPLPQGADYQHGERYGIATLREAVFARDGYKCQCCGRTIKDGAILHVHHIKYRSQGGTNSMSNLATVCDKCHTPKNHKPGGKLYNWKPKLSSFKGATFMTTIRWQLYSEAKALFSDIDIYITYGAATKERRRELDIDKSHVNDAFVMGQFHPNHRIKAVLCKKKRRNNRCLEKFYDAKYIDSRDGSKKTGQELSNGRINRNHKKDSENLRQYRLQKVTAGKRTVRKQHYKIQPHDIVIYENRKRETAGCHCNGTRVMLLTDKKSASIKKVKVYRYAGGYFKSAFN

SEQ ID NO: 19354 - protein, 395 aa, Pseudomonas sp.
LQSLTLKFDPGSKFTGIALVRQKGQRVSVLSLMELAHRGAAIRQAMQQRAAFRRRRRGQNLRHRTPRFDNRTRPEGWLPPSLRHRLDTTLGWVGRMRNWAPISDLAVERVKFDMQAMQNPEISGVKYQQGELAGYEVREYLLEKWGRCCAYCNAENTPLEIEHIVPRSAGGSDRVPNLTLACRPCNQRKGNQPVEVFLKARSELLARIKAKAKVPLRDAAAVNATRNALFRALLDTGLSVTTGTGAQTKFNRRCLGLPKTHALDAASVGEIRAIEHWQRPTLAIKATGRGEYQRTRLTAHGFPRGYLTRQKRHFGFQTGDQVRAEVPTGKKAGTHQGRVAVRKTGSFNIQTPDGVVQGIHHRHCTLIQRADGYAYSDTPTDSAQPQKEAARAGAR

SEQ ID NO: 19355 - protein, 430 aa, unidentified
  source 1..430: note = uncultured Candidatus Competibacteraceae bacterium
MNKVFVLSSTKEPLMPTRPARARQLLTRGRAAVYRMQPFTIILKDRETGDTQPVEVKVDPGSKATGIALVGHFEQQGAVVLWGANVNHRGQTMKNNLESRASLRRGRRGRKTRYRQARFLNRTRNAGWLPPSVESRVGNTESVINRLATRCPITEVSIEIVKFDMQAMVNPEISGTEYQQGTLAGYELREYLLEKWHRTCAYCGAKDVPLQIEHIQPKALGGSNRVSNLTLACKPCNQKKGSQPITVFLKTKPELIKKIQAQAKAPLKDAAAVNASRWALKNRLEKRWPVSCGTGGRTKFNRTKQGYEKDHWRDAACVGESGERVLIREGMKPLIITAKGRGSHQVVRTDKFGFPRSKAGRIKRVHGFSTGDIVKLIQPKGKYAGTYIARLAGIRATGQFDIKTPTAKITANHKHFQLIQRNDGFEYAAS

SEQ ID NO: 19356 - protein, 461 aa, unidentified; identical to SEQ ID NO: 4910

SEQ ID NO: 19357 - protein, 413 aa, unidentified
LKVFVLNMRGKPLMPCSPAKARHMLKAGKAFVVRRTPFTIKLTIATGETKQDVTLGVDAGARHVGISATTEKEEVFASEVKFRQDITGLLADRLAFRRARRNRKTRYRAPRFNNRVRSKHKGWLAPSVENRIQAHMSRIEAVCRLLPVTKIVIETASFDIQKIRNPEVEGTGYQQGDQLGFWNVREYVLFRDGHICQHCRGRSKDPILNVHHLESRKTGGDAPNNLITLCETCHKAYHAGKIKLKVKRGQSFRAEAFMGIMRWTLLDRVRKTHPKLPVENTYGYLTKHKRIALGLPKTHCADAFCIAGNLKALRRGDFLFQQQTRKHNRQIHKCSILKGGVRKLNQAPFLVKGFRLFDKVRIGGQIGFVFGRRVRGTFNIRRLDKTVIGTDINCKKLSLLETRKTFLTELRKE

SEQ ID NO: 19358 - protein, 456 aa, unidentified
  source 1..456: note = Lachnospiraceae bacterium UBA7766
MLTYVLAADGSPLMPTYNISKVRRMLKDGRAVIAGHKPGFTIRLTYALPDQKTPHTQKIELCEDTGYQHIGVSVKSKKHEYVHLQVDTLADEKNHHDAQRRYRRNRRNRLRYRAPRFDNRTHSKKPGWIAPSLQHKADIHVRLVSTFQKVLPICDVYLEVGTFDTQVLEAKEKGLPIPEGSDYQHGTRYGIATLREAVFYRDGYKCQCCGKGIKDGRILRVHHIGYWKTPSDHTDRMGNLITVCTKCHTAANHKKGGKLFGWKPKMMPLTGAAFMNTVRWKIVQAVKDLDSNLTVHATYGADTKLSRRDHSITKTHANDAYCMGMFQPGHRAPEQLLKKKRRNNRVLSKFYDAKYIDSRDGVKKSGSDLSCGRTNRSEPRNGEQNLRIFHGKKVSKGRISVRRQRYPIQPGTQVMYKKHTYVAVGTHNNGRAVVLNLGKSVSVSKLRILHHAGAFV

SEQ ID NO: 19359 - protein, 429 aa, Petrotoga sp.; identical to SEQ ID NO: 5336

SEQ ID NO: 19360 - protein, 420 aa, unidentified; identical to SEQ ID NO: 8060

SEQ ID NO: 19361 - protein, 415 aa, unidentified; identical to SEQ ID NO: 16389

SEQ ID NO: 19362 - protein, 410 aa, unidentified
MRGKPLMPCKPRKARLLLKQGKAKVVKRDPFTIQLTIATGEAKQDISLGVDSGSKYIGISATTKKHVLFEAEVELRNDIVKLLADRRQYRRSRRYRKTRYRQARFLNRKKPEGWLAPSIQHKINSHIKIIDMLTKLLPITDITIEVASFDIQKIKNPDIQDKEYQQGDQLGFYNVREYVLWRDNYQCQGRKGCKNKILNVHHIESRKTGGNSPNNLITLCETCHNDYHAGKLKLNLKRGQMFKDATFMGVMRWATYNALKELYPNVKLTYGYITKHKRIKYGLEKSHRMDARCISGNPLAKPLDTYYYFKCVRKQNRQLHKATPSKGGVRKNNKAPRYLHGFQLFDKVSYQNQECFIFGRRTSGYFDLRKLDGTKVTASASVKKLKLIERSNTLLCERREGNSSPAYTIF

SEQ ID NO: 19363 - protein, 456 aa, unidentified
MSTCVCVLSNSGERLMPTIRLGKVRQLLKDGKAKIVKHHPFTIQLLYDSKTNTQPIEICEDVGYNYIGISVKSQSHEYVSAQYDTLQDEKACHDSCRKLRRTRRNRLRYRKPRFDNRKCSEGWLAPSLEHKKQLNIRLIERYVSVIPITHATVEVGSFDTMLLQAIQKGKSKPEGVDYQKGPRYNLATLREAVFYRDNYTCQVCGRKIADGAILHMHHMFYWKGRHGYQLDELVTACEKCHTPANHQKGGKLFGFGEDKEFANLSGAAFMNAVRWQIVDALYATYGKEFVTITYGAMTKEKRIALQLEKTHSNDAYAMGNCHPAHRCEFGHYQKRCRNNRVLEKFYDATYIDTRTGNKAKGKELFNGRISRNHKKDSEDLHKYRSKKMSKGCRSIRRQRYAIQPYDTVRLEGKTYITSGCHNKGTRLLIPANGKSKSVAISKVQVVCHAGAWIQII

SEQ ID NO: 19364 - protein, 440 aa, unidentified; identical to SEQ ID NO: 3187

SEQ ID NO: 19365 - protein, 431 aa, unidentified
MPDKVYVISQLGHPLMPCSLAKARHLLDDKKTKVVKRMPFTIRLLYGSTKYIQPIILGVDAGSKTIGLSASTAKGEVFAAEVMPRNDVVENLSTRREFRRARRNRTTRYRKPRSDNRVRSNHERWLAPSVKVKIQEHITSIKRVCTILPISKVVIETAEFDLQLLKAIQEGKPIPEGEDYQKGEMYGSYNVCQYVLWRDNYTCICCGVRGTPKNPVRLHVHHFESRKYGGNAPDNHGTLCDDCHKKFHLGIIADVKLKTRRRQSTRDAAFMGIMRKTLMWRLRTELYIPVAETKGYITKATREKLLVLPKSHTRDTLAIAQGRHGFSIKEYAYVEPANHIYTVRPVRHHNRQLHKASILKGGIRKRNQASKYVFGFRLYDKVLYQGKACFVWGRRTSGTFLLRTIDGIKVKDGVSYRNLTLLERSSNYLIA

SEQ ID NO: 19366 - protein, 424 aa, unidentified; identical to SEQ ID NO: 3351

SEQ ID NO: 19367 - protein, 420 aa, unidentified; identical to SEQ ID NO: 15202

SEQ ID NO: 19368 - protein, 415 aa, unidentified; identical to SEQ ID NO: 6883

SEQ ID NO: 19369 - protein, 442 aa, unidentified
MVTVQQSTHHLPFGRVFIRRNLFMVYVISQDSKPLMPCSNPIARLLLKQGKAKVKRREPFTIKLIYETTDYTQDLTLGVDTGSETIGAAVSKDNGDIVYMSEVVVRNDITDKMTQRAKYRRNRRNRKTRYRKARWLNRSNSIKKDRFSPTMQSKLHSHVKEIEYIQSILPITEMVFETGQFDMHLMKDPSLANPKVRPWGYQKGTNYGFENTKAMVLNRDNYTCQCCKGKHKDSKLEVHHIVFRSQGGSDEESNLITLCHTCHKDLHSGKINLKLSGKVKGNLKYATQMNSIRKQLFRLYPNAIETFGYVTKANRLHLGVDKEHYYDACTIATQGNTFNVKSNLYKKKCVSDGDFQKTKGICSEQPIVTDKICGFRKFDKVRYFGKDYFIKGRMSTGYAILMDIDGNKIDFSTMPRGYKTPKLSNCKRITARSTVMTQVKVV

SEQ ID NO: 19370 - protein, 407 aa, Fervidobacterium sp.; identical to SEQ ID NO: 9479

SEQ ID NO: 19371 - protein, 298 aa, unidentified
VGFPGLRLVKIQEHITVIKRICRILPITLVRVETAEFDTQRLKAMLAGKPLPVGTDYQLGEMYDEYNVRQYVLKRDNYTCQCCGAHTTAKKTVKLHVHHLESRKVGGNAPSNLITLCTTCHNNLHKGKITLDGKKRGKTLRDAAFMGIMRNTLLTRLRNELNIPVQNTYGYITKLLREQNDIKKSHVNDARCISKHPLAKPCSVCYRTKAIRHHNRQIHKAKILKGGIRKANQVPYIVKGFRLWDKVLYNEQECFISGRRSSGYFALRKFDGTTITNSISFKKLRLLEPATNYLIERK

SEQ ID NO: 19372 - protein, 557 aa, unidentified; identical to SEQ ID NO: 3108

SEQ ID NO: 19373 - protein, 416 aa, unidentified; identical to SEQ ID NO: 6623

SEQ ID NO: 19374 - protein, 413 aa, unidentified; identical to SEQ ID NO: 2636

SEQ ID NO: 19375 - protein, 429 aa, unidentified; identical to SEQ ID NO: 11852

SEQ ID NO: 19376 - protein, 465 aa, unidentified; identical to SEQ ID NO: 3603

SEQ ID NO: 19377 - protein, 494 aa, unidentified; identical to SEQ ID NO: 5675

SEQ ID NO: 19378 - protein, 442 aa, unidentified; identical to SEQ ID NO: 3218

SEQ ID NO: 19379 - protein, 413 aa, unidentified; identical to SEQ ID NO: 4044

SEQ ID NO: 19380 - protein, 411 aa, unidentified; identical to SEQ ID NO: 3917

SEQ ID NO: 19381 - protein, 417 aa, unidentified; identical to SEQ ID NO: 17640

SEQ ID NO: 19382 - protein, 427 aa, Mastigocoleus sp.; identical to SEQ ID NO: 18901

SEQ ID NO: 19383 - protein, 489 aa, unidentified
VTDVSTVYVLNKDGKPLMPTTRCGHVRYLLKEKKARVVKTKPFTIQLLYKTNDVVQPLYLGIDPGRTNIGVAVVKADGTAVFTAHLETHNKKIPKLMKKRKDSRRARRTNGRRCRRQRRAKANGTISKKCVKQATAQNGSASKRAKKIGVIKRHLPGCEKEVLCIGIKNKEAKFNNRTRPAGWLTPTANQLLQTHINLIKKIQKLLPISDVVLEINKFAFMQLDNPDIQKWQYQQGPLYQKANLEEAVSEMQEHHCLFCKKKIDHYHHVVPQHKNGSNTIDNIVGLCTKHHDLVHKDTAWHEKLTKKKTGLNKKYGALSVLNQIIPALTKELSSIFPKHFFVTTGKSTYDYRAAHGVSKDHWLDAYCIACSVLPNDVCDSSINNRVPYELKQFRRHDRRALHKENMSRVYTLNGKKVATNRHKATEQTADSLEEFRQNHPDDVCKLKVKEHHSEYRNPKRNFPGYVFLVGKRTHVMQGTSGSHNGKADG

SEQ ID NO: 19384 - protein, 422 aa, unidentified; identical to SEQ ID NO: 7962

SEQ ID NO: 19385 - protein, 250 aa, unidentified
KPLPVGTDYQLGEMYDEYNVRQYVLKRDHYTCQCCGAHTTTKKTVKLHVHHLESRKVGGNAPSNLITLCTTCHDALHKGKVSLDGKERGKPLRDAAFMGIMRKTLMARLRDELSIPVQGTYGYITKMRRERNDIKKSHVNDARCISKHPLAEPCSVCYRTKAIRHHNRQIHKANFSKGGIRKRSQMPYVVEGYRLWDKVLYKGQECFVSGRRASGSFTLKKLDGTRISKGVTFKKLRLLEPATNYLIERM

SEQ ID NO: 19386 - protein, 472 aa, unidentified; identical to SEQ ID NO: 4432

SEQ ID NO: 19387 - protein, 421 aa, unidentified; identical to SEQ ID NO: 6697

SEQ ID NO: 19388 - protein, 451 aa, unidentified; identical to SEQ ID NO: 18560

SEQ ID NO: 19389 - protein, 430 aa, unidentified; identical to SEQ ID NO: 4504

SEQ ID NO: 19390 - protein, 473 aa, unidentified; identical to SEQ ID NO: 3562
  source 1..473: note = uncultured beta proteobacterium

SEQ ID NO: 19391 - protein, 470 aa, unidentified; identical to SEQ ID NO: 2949

SEQ ID NO: 19392 - protein, 442 aa, unidentified; identical to SEQ ID NO: 10903

SEQ ID NO: 19393 - protein, 431 aa, unidentified
MPNKVYVINKHGRPLMPCSPAKARHLLDDGKAKVKKRAPFTIQLVYGSSGYTQEVILGVDAGSKTIGMSASTTKEELLSAEVKPRNDVVDLLSTRREFRRARRNRKTRYRKPRFDNRVRSKHKGWLAPSVEVKIQEHITSIKRACRILPVSKVVVETAEFDLQLLKAIADGKPVPQGEDYQKGEMYGHYNVRQYVLWRDNYTCQCCGTHPSKKKEVRLHVHHLESRKVGGDAPDNQVTLCESCHEKLHKGLIAEKDFKKRKRKSTRDATFMGIMRKTLMQRLCSELPIPVIETRGYITKATREKLLVLPKSHTNDALAIAQGKQGFNVGYLPGIVQINKIYTIRPVRHHNRQLHKATILKGGIRKSNQTEKYVFGYCLFDKVQFNGQDCFIWGRRTTGIFTIKTINGKMIKDGISFKKLKPVEKSTGYLIA

SEQ ID NO: 19394 - protein, 420 aa, unidentified; identical to SEQ ID NO: 7764

SEQ ID NO: 19395 - protein, 368 aa, unidentified
VQPLYLGIDPGRTNIGVAVVKTDGTAVFTAHLETRNKEIPKLMQGRKKARRARRTNGRRCRRQRRAKANGTISKKCVKQTTAQNGSVSKRAKKIGVIKRHLPGCEKKVLCIGIKNKEAKFSNRTRPEGWLTPTANQLLQTHINLIKKIRKFLPVNDVVLEINKFAFMQLDNPNIQKWQYQQGPLYQKASLEEAVSEMQEHHCLFCKKSIVHYHHVVPQSENGSDTIGNIVGLCTKHHDLVHKDTAWQKKLAKKKTGLNKKYGALSILNQIIPALTKELSSLFPKHFFATNGKSTHDYRAAHDVSKDHWLDAYCIACSILPNDTCDKNINGRVPYKLKQFRRHDRRALHKENMSRVYTLDGKKSCHKSA

SEQ ID NO: 19396 - protein, 512 aa, unidentified; identical to SEQ ID NO: 3720

SEQ ID NO: 19397 - protein, 414 aa, unidentified
LRVFVLNKRGKPLMPCSPAKARLLLKEKKAIVKRRTPFTIQLTIATGETKQPVSLGVDAGYKHVGLSASTEKAELYASEVELRQDITDLLSARRALRQSRRNRKTRYRAPRFDNRIRTKRKGWLAPSVENRINAHLSRIEAVLRLLPITKITVETASFDTQLPKNPDIAGKEYQEGEQLAFWNVREYVLFRDGHVCQHCHGRSKDPVLNVHHLESRRTGGDSPGNLITLCETCHKALHRGEIKLSAKRGQSLRAEAFMGIMRWEVLNRLKLSHPELEVNNTYGYRTKHARIANGIAKSHCADAFCIAGNLGAKRLGEFFFQKQTRRNNRQIHKFSILKDGIRKRNQAPFEVNGFRLFDKVACKGEEGFIFGRRSSGFFDVRKLDGTCISAGISYKKLHLLEKRRTYLTEIRKEE

SEQ ID NO: 19398 - protein, 427 aa, Mastigocladus sp.; identical to SEQ ID NO: 3596

SEQ ID NO: 19399 - protein, 512 aa, unidentified
MSTVYVLNKDGKPLMPTTRGWHVRYLLKEKKARVVTSKPFTIQLLYETDDVVQPLYLGIDPGRTNIGVAVVKTDGTAVFTAHLETRNKEIPKLMQGRKKARRARRTNGRRCRRQRRAKANGTISKKCVKQTTAQNGSASKHAKEIGVIKRHLPGCEKDVLCIGIKNKEAKFGNRTRPEGWLTPTANQLLKTHINLVKKIRKFLPISDVVLEINKFAFMRLDNPNIQKWQYQQGPLYQKASLEEAVSEMQEHHCLFCKKSIAHYHHVVPQSENGSNTIGNIVGLCTKHHDFVHKDTAWQKKLAKKKTGLNKKYGALSVLNQIIPALTKELSSLFPKHFFATNGKSTHDYRIAHDVSKDHWLDAYCIACSVLPNDTCDRTINSRVPYELKQFRRHDRRALHKENMSRVYTLNGKSVATNRHKATEQTTDSLEEFRQRKPNDVCKLKVKEHHPEYRNPERNFPGCVFLVGKHTHVMQGTSGSHNGKADGYYDTNGNSYPSGKCKFVAKNKGIVFA

SEQ ID NO: 19400 - protein, 512 aa, unidentified; identical to SEQ ID NO: 8121

SEQ ID NO: 19401 - protein, 424 aa, Planktothrix sp.; identical to SEQ ID NO: 4537

SEQ ID NO: 19402 - protein, 425 aa, unidentified
MLVYVVTKDKQPLMPCTQVIARLLLKQERVKVKRRKPFTIQLLYETTKYKQDLELAVDTGSGKLATAVRTEQDEIVYLSEVAVRNDITGKMTERRTKRRSRRHRKTRYRKPRFDNRRNLRRKDRFSPTMQSKIHSHVKEIEYIKSILPITRIILETGQFNPHRMKNPALANPNIRHWGYQKGPNYGYENTRAMVLDRDNHQCQYCHGKRKDRHLEVHHIVFRSQGGSDDAKNLITLCHTCHQALHKGKIHLDLEGMEKGTLKYATQMNSIRKQLLRRYPEAIETYGYITKANRLAMDLPKEHYIDACVIATEGRPFTINSLLYRKKCVSAGDFQQYHGKRSEIRQATGKIMGFRKYDKVRYFGKYYFIKGRMSTGYAVLMDINGDTVKFSDMPWGFKTPKLERMERIQARSTWMVMSEEVTPNIV

SEQ ID NO: 19403 - protein, 424 aa, unidentified; identical to SEQ ID NO: 3434

SEQ ID NO: 19404 - protein, 411 aa, unidentified; identical to SEQ ID NO: 3917

SEQ ID NO: 19405 - protein, 426 aa, Spirulina sp.
MSIPNFVFVLDTHRKPLTPCTPGMARSLLKAGKAMVFRLYPFTIILPKAVQATPEPLTLKLDPGSQVTGIALLQTTVLIWVAELIHRGQGIQAALLSRRQLRRSRRNRKTRYRQARFLNRTRPQGWLAPSLQHRVDTTVTWVKRLSKLAPMGGIVQELVRFDLQRMENAEISGVEYQQGELQGYEVREYLLEKFHRQCIYCGAKDLPLEVEHIHPRSRGGSNRVSNLTLACHSCNQAKGNQDVQDFLSGKPDLLQRVLSQAKAPLKDAAAVNATRWALFNALKATGLPVSTGSGGRTKFNRTRLGLPKRHYFDAACVGETEELTVLSEQPLLIRATGHGTRQMCRTDKFGFPVRYVPRFKFIQGFQTGDIVKAVVTSGKKVGIYIGRVAVRTSGYFNIATPRGLLQGISHKCCKALQKKDGYAYGY

SEQ ID NO: 19406 - protein, 470 aa, Anaerostipes sp.; identical to SEQ ID NO: 2825

SEQ ID NO: 19407 - protein, 443 aa, Anoxybacillus sp.
MVEENMTCFMQRKGENPMVFVLDTNKRPLAPCHEAVARKLLKQGKAAIYRRFPFTIILKKSVDESEIKATYRLKIDYGSRHTGLAILRGQEVVWLGQLDHRTDIKERIDKRRAFRRARRNRKTRYRKPRFLNRKRKEGWLPPSLESRMQNIKTWVERLRKICPIEHISYENAKFDTQLMRNPEINGVEYQQGTLQGYEVREYLLEKFGRKCCYCGKEGVPLEVEHIIPKSRGGTDRIDNLCLACRDCNQRKGSQTAEEFGYPHIQEMVKKTLKDASVVNATRWKVYEVLKQSGCEVECGTGARTKMNRIRLGLPKIHYFDACCVGKSTPLQLHFKTKEVLFIKAKGRGSRSRTNLDRYGFPRGYLARQKYFFGFQTGDMVKAVVPRGKYQGVWFGEVACRKTGSFDIKGKDGKRIAQGINYRYVQVIQRFDGYAYGKGVAELA

SEQ ID NO: 19408 - protein, 476 aa, unidentified
VSLLFYERISCMNTCVCVLSNSGERLMPTFRLGKVRRLLKDGKAKIIKHHPFTIQLLYDSKTNTQPIEICEDVGYNYIGISVKSQSHEYVSAQYDTLQDEKACHDSCRKLRRTRRNRLRYRKPRFDNRKRGEGWLAPSLKHKKELNVNIVKMYCTVMPITHATVEVGSFDTMLVKAIQEGKAVPEGADYQKGPRYNLATLREAVFYRDNYVCKICGRKATEGAILHMHHMFYWKGRHGNSLNELLTVCEKCHTPANHQKSGKLYGFGEKIKFADLSGAAFMNTVRWQIVNELYVAFGKPFVTITYGAMTKEKRIALQLEKSHNNDAYAMGEFHPNLRCMFEHYEKARRNNRILEKFYDSRYIDIRTGEIATGKELFNGRINRNHKKDSENLHKYRGKRTYAGHRALLRKKVNLNPGDLVSLNGENLIVHSTHTKKNGAVNVEFETPAKSGQKSASLKKLKIVKAANSIHPAWKKIS

SEQ ID NO: 19409 - protein, 415 aa, unidentified; identical to SEQ ID NO: 7357

SEQ ID NO: 19410 - protein, 465 aa, unidentified; identical to SEQ ID NO: 7667

SEQ ID NO: 19411 - protein, 443 aa, unidentified
LTKDENRPSGRTTGLRAEQAEPAGIRKGDTLKVFVLNMRGKPLMPCSPAKARHMLKAGKAFVVRRTPFTIKLTIATGETKQDVTLGVDAGARHVGISATTEKEEVFASEVALRQDITGLLADRLAFRRARRNRKTRYRAPRFNNRVRSKHKGWLAPSVENRIQAHMSRIEAVCRLLPVTKIVIETASFDIQKIRNPEVEGTGYQQGDQLGFWNVREYVLFRDGHVCQHCHGRSRDKILNVHHLESRKTGGDAPNNLITLCETCHKAYHAGKIKLKVKRGQSFRAEAFMGIMRWTLLDRVRKTHPKLPVENTYGYLTKHKRIALGLPKTHCADAFCIAGNLKALRRGDFLFQQQTRKHNRQIHRCSILKGGVRKLNQAPFLVKGFRLFDKVRIGGQIGFVFGRRVRGIFNIRRLDKTVIGTDINCKKLSLLETRKTFLTELRKE

SEQ ID NO: 19412 - protein, 424 aa, unidentified; identical to SEQ ID NO: 4955

SEQ ID NO: 19413 - protein, 423 aa, unidentified; identical to SEQ ID NO: 12332

SEQ ID NO: 19414 - protein, 431 aa, unidentified
MPNKVYVINKHGRPLMPCSPAKARHLLDAGKAKVKKRTPFTIQLVYGSSGYTQEVILGVDAGSKTIGVSALTKKEELFAANVIPRNDVVDLLSTRREFRRARRNCKTRYRKPRFDNRVRSKHKGWLAPSVEVKIQEHITAIRRVCGILPVSKVVVETAEFDLQLLKAIEKGKPVPQGEDYQQGEMYGHYNVRQYVLWRDDYTCQCCGAHTTKKKEVRLHVHHLESRKTGGDAPSNLITLCDSCHEKLHKGLIAEKDFKKRKRKSTRDATFMGIMRKTLMQRLCSELPIHVVETRGYITKATREKLLVLPKSHINDALAIAQGKHGFNVGYLPGILQIDMIYTIRPVRHHNRQLHKATILKGGIRKSNQTGKYVFGYRLFDKVQFNGQDCFIWGRRTTGIFTIKTINGKMIKDGISFKKLKPVEKSTSYLIA

SEQ ID NO: 19415 - protein, 493 aa, unidentified; identical to SEQ ID NO: 2644

SEQ ID NO: 19416 - protein, 426 aa, unidentified
MLVFVFNKHGEQLMPCKPSKARRLLKKNKAKIVKYNPFTIQLLYGSSGYKQDIKVGVDLGAKNIGIAIQSNNKVIAKGEIELRTDVKSNLDTRRIYRSSRRNRKTRHRKPRFDNRKRKDNWLPPSIQSRIDNTFNWIDKFLMLLPKSKLNIEVGKFDIQKIMNPEIEGEEYQQGETYGYYNTRYYVFERDNYTCQVCKNKNKILQTHHIIYRSKGGSDRPKNLITVCVDCHTHENHQKGNIFWEWMQKGKKVPRYKETPFMNTIRKEVFRKHPNVNLVYGSWTTPNRKALGLEKTHFNDALTVSNIQDGFIDKINIFKIKQFRKKKRSLHEANPRKGRKVPNTKAKRNKKNTVCSNGFNLNDKVKLFGQTGWISGFCQGGAYVKNIYDEYITVPEKSYKQVSFKYLTFVCHNNNWKFTTFANSSHD

SEQ ID NO: 19417 - protein, 416 aa, Parasutterella sp.; identical to SEQ ID NO: 10114

SEQ ID NO: 19418 - protein, 512 aa, unidentified
MSTVYVLNKDGKPLMPTTRGGHVRHLLKEQKARVVRAKPFTIQLLYETNDVVQPLYLGIDPGRTNIGVAVVKANGTAVFTAHLETRNKEIPKLMQDRKKARRARRTNGRRCRRQRRAKANGTISKKCVKQTTAQNGSVSKRAKDIGVIKRRLPGCEKDVLCIGIKNKETKFTNRTRPEGWLTPTANQLLQTHINLVKKIQKFLPISDVVLEVNKFAFMRLDNPNIQKWQYQQGPLYKKESLESAVSEIQEHHCLFCKKPIDHYHHVVPQHKNGSNTIGNIVGLCAKHHDLVHKDSAWEKKLAQKSTGLNKKYGALGVLNQIIPTLTNELSSLFPKHSFVTNGKSTYDYRAAHGVSKDHWLDAYCIACSVLPSNVCDSNINNHMPYELKQFRRHDRRVLNNENMNRVYTLNNKAVAINRHKAKDQKTVSLEKFRKEHPDDVCKLKVKEHHPTYRNMNRNFPGSVFLVGKQIHVMQGIASSKDGKATKYNDTSATAIATGKCKFVAKNTGILFV

SEQ ID NO: 19419 - protein, 413 aa, unidentified; identical to SEQ ID NO: 7541

SEQ ID NO: 19420 - protein, 442 aa, unidentified; identical to SEQ ID NO: 3234

SEQ ID NO: 19421 - protein, 414 aa, unidentified
MVYVINKQGQALMPTERFGKVRRLLKNSLAHVVCRIPFTIQLDYDTTDYTQPVSLGVDAGSKHIGISATTSEKELYAADVELRNDIVDKLSTRREQRRTRRSRLRYRKARFNNRVSSKRKGWLAPSVENKIQTHLTVVEKIHKFLPITNIVVETASFDIQKINNPIISGSEYQQGEQLDFFNVREYVLFRDNHICQHCKGKSKDKVLNVHHIESRKAGGDSPNNLITLCETCHKAYHRGEFELNVKRGKSFRDAAFMGIMRWSFYDRLKNIYPNVSMTFGYITKNTRITNNLPKDHYVDARCISGNPTAKPLGYYFYQKKVRCQNRQIHKANFLKGGRKKLNQAPFLVKGFRLFDLVEYQNDLYYIFGRRDSGFFDIRKLNGTKVNKGSINCKHLRLIATRKSILIEKRMQVNL

SEQ ID NO: 19422 - protein, 373 aa, Moorena sp.; identical to SEQ ID NO: 6300

SEQ ID NO: 19423 - protein, 453 aa, Lactobacillus sp.; identical to SEQ ID NO: 4050

SEQ ID NO: 19424 - protein, 433 aa, Scytonema sp.; identical to SEQ ID NO: 2739

SEQ ID NO: 19425 - protein, 424 aa, unidentified; identical to SEQ ID NO: 8578

SEQ ID NO: 19426 - protein, 412 aa, unidentified
MTNYAFVLDANGKQLAPTKEQKAWFLIRKKRATLVSKYPMVIQLKKEIPDEQIYKDEICCGIDDGGLHVGISLVQKCKTKNKVVFKGTMEQRKDVKHLMEVRKGYRRYHRFYKRYRQARFNNRKSSKRKERIAPSILQKRQATIRVINQLNKWINITNYWLEDVAIDIRALTDDYKAYRWQYQQSNRLDENIRKAVILRDGCKCMECGKSNCKLEVHHIKPRRSNGSNTLGNLISLCKKCHQKTEEQEEVYMNRYFSMLNSSDNKNLNYAQHVMIGKKWLIEQLSKLGTLTLATGGDTANKRIDWNIEKSHSNDAICIAGLQPDTCNVKEWTIKPMRRQSKAKTDNVLGINHRDLVEYTFRNGETHRGYVTALYPGQNAINFQSSTKHCKKVNAKKCKLIWKYSKIYWLANV

SEQ ID NO: 19427 - protein, 442 aa, unidentified
MSTSVFVLDKKHRPLMPCRPARARRLLRAGRARVVKRFPFVIRLVDRTVEQSEVQPVLIKLDPGSRETGAAVVRDDEKKRHHALAFFVIEHRGGAIRDALKARSAFRRRRRSQNLRCRSPRFLNRVKPKGWLPPSLRHRVETTLSFVRRMCRYLPVSGIAAELVKFDSQKLQTPEVSGIEYQQGTLFEYEVREYLLEKFGRKCVYCGAEGVPLNIDHVVPRAKGGSNRVSNLVLACVSCNQKKGARSLEDFLKGKPEVLARVRRELKTPLRDAAAVNATRWVLFNELKATGLPVETGSGALTKFNRHAFGVEKEHWLDALCVGRLNGVVTRKGLNVLEIRCMGRGSRQRTRLTKYGFPRGYLMRQKCVHGFATGDMVEANVPKGKKAGLWRGRVAVRVSGSFNIQTPKGVIQGVGWKHCRLISHNDGYGYAWLGHAPHSSPA

SEQ ID NO: 19428 - protein, 427 aa, Desulfobacter sp.
LFWIQTKKPQNPVHPAKARLLLTEGKAAVFRQFPFTIILKEKVLDVASNPLRIKIDPGSRETGIAVINDDSGEIVFAMELRHRGQQIKNNLESRRAIRRSRRNRKTRYRKPRFDNRTRAEGWLPPSLKSRVHNIETWVNRLCRFCNIQAISMELVRFDMQKIQNPEISGVAYQQGELMGYEVREYLLEKWDRTCAYCGKTDILLEIEHIVPRSKGGSNRVSNLTLACTACNRKKGNKPIEQFLSRKPGLLKRIQKQSKVPLKDAGAVNTTRWDLFRTLKKNGLPVETGSGGLTKFNRTTRGLHKTHWLDAACVGQSTPEKIFQIDKAVLIVKADGHGSRQMCRVNKFGFPRTTAKSTEKKVKGFQTGDIVKAVVTSGKKVGTYTGRVAVRKSGSFNIKTVDKTVQGISWKYCRLLHASDGYSYNTTC

SEQ ID NO: 19429 - protein, 442 aa, unidentified; identical to SEQ ID NO: 7396

SEQ ID NO: 19430 - protein, 452 aa, Lactobacillus sp.
MRIAAGNMIAGKGGKMEYENANRVFLLNKDGKPLMPCHPRKARLLLKSGKAFVVKKYPFTIQLKYGSYGYKQKVSLGVDTGQRHIGFAVTSQDKVLYQSEVELRQDVHKNLYTRSIYRRSRRNRKTRYLNRVHGKRDGLWLPPSVKGKVNHNIAWIKRYLAVLPNPDLHIEVGKFDMAKMVNPAISGKQYQEGSLHGWKNYEYYVLARDKYTCQLCHKHGEGVKLVVHHIVYRSQGGTDRVDNLITLCTNCHTTKNHQPSGKLYKWMKAKKKVTTHLKGATFMNILRKRIMAAFPEASYQYGYQTFFERKKFNLPKGHFTDAIAISGIREINQMPETVTMISQFRKKKRSLHEASARKGRKEPNRTSKRNAKNTKYARGLWLNDYVHVIGTNLRGYVQSYLSKGAYVRLSDGLGNYVTKDGKNYISTKLCKPITHNGNWQKAEQKLSLYEFK

SEQ ID NO: 19431 - protein, 452 aa, unidentified
  REGION 1..452: note = IscB polypeptide
MMQKLQVKFKNTPTDTPQVCSFVNSGLNRDQSPSVQGTVRTCNIPEVDHLQHTGGQNSRVSDIVYVINMRGEPLMPTSQQKARRLLREKKAKVIKRFPFTIQLLYSTGETKQNISCGIDSGYKSIGFSCRTDKRELISGEVTLENNVTRRLLEKRMYRRGRRNKLWYRKPRFLNRGIPKGWLPPSIERRYQTHLHVISRLKALLPITDIIIEVGNFDIQKIMNPEIQGKEYQQGPMYGYENRIAYLISREQGKCQCCKNKYKKGDGWRLHHIWGKEKDRPEDWALLHESCHEKLHKNHEEEILRKQKSKSYKDSTFMNIIRNKFQEDIDCQITFGYETHIKRNNLCLNKSHVNDAFVISGGENQERVNQYQVTQKHRNNRCLQLNRKGFRPSIKKNRSIIQPKDLFWVNGIKYSCKGMFNRGSYISYGSKKKEYFKFKEVEKIFRVGSLVWN

SEQ ID NO: 19432 - protein, 454 aa, unidentified
LDTVAVISASGRKLMPTNSYRARRLLKLKRAVIYKYRPVFTIKLVDRTNGYTQPIEYKCDTGYQNIGISICSDTKEFVNEQRELLKDEVKRHSDSRKYRRTRRNRLRYRKKRFDNRKGMISKDGFAPSIRNKRDVHIHLYEEYYKVFPITKAVFEMGQFDTQVLKAVEAGLPIPDGTDYQRGEQYGYATLREAVFARDNYKCICCGKSAVRDGVKLRIHHIGYLSGDRSNRMANLGSVCESCHTSKNHKPGGKLYSLKPELKTFKGATFMTTVRYSMVKKLKVMTPTVDIKVTYGAATKLARRVLSVKKTHSNDAYCMGEFHPKHRSDFKHYKKCRRNSRVLSRFYDAKYRDLRDGSVKTGSQLSCGRTNRKISRHAELDERIYRAHKISKGRVSTRRQHYSLRPGDKVLYDGKVYFVTGMQNSGTHVKLTNGKVCSLKKVHVLQHCNAWTAVI

SEQ ID NO: 19433 - protein, 512 aa, unidentified
MSTVYVLNKDGKPLMPTTRGGHVRHLLKEQKARVVASKPFTIQLLYETDDVVQLLYLGIDPGRTNIGVAVVKTDGTAVFTAHLETRNKEIPKLMKKRKESRRARRTNGRRCRRPRRAQANGTISKKCVKHDTAQNGSVSKRAKEIGVIKRHLPGCEKDVLCICIKNKEAKFSNRTRPEGWLTPTANQLLQTHINLVKKIQKFLPISDVVLEINKFAFMRLDNPNVQKWQYQQGPLYQKANLEEAVSEMQEHHCLFCKKPIAHYHHVVPQSENGSDTIGNIVGLCTKHHDLVHKDATWQKRLAKKKTGLNKKYGALSVLNQIIPALTKELSSLFPKHFFATNGKSTYDYRSAHGVSKDHWLDAYCIACSVLPNDVCDSGINNRVPYELKQFRRHDRRALNNENMSRVYTLNDNVVATNRHKATKQTTDSLEEFRQNHPDDVCKLKVKEHHPTYRNMNRNYPGSVFLIGKQVHVMQGIAGSKDGEATTYKDTNANSIAAGKCKFVAKNSGILFV

SEQ ID NO: 19434 - protein, 465 aa, unidentified; identical to SEQ ID NO: 10340

SEQ ID NO: 19435 - protein, 424 aa, unidentified; identical to SEQ ID NO: 17364

SEQ ID NO: 19436 - protein, 496 aa, Streptomyces sp.; identical to SEQ ID NO: 4777

SEQ ID NO: 19437 - protein, 544 aa, unidentified
MKQKKQKVMVYILNKKGKPLMPTTRCGHVRKLLDSKKAVVVSSNPFTIRLKYDTPNGVQDVFAGIDSGRENIGSGASNEDGDCLYLGELKTSNKSIKMKMTERAGFRKERRSHDRQNKQRKARKDHTEIQNGNADICRTTISCKSVQISYPAAEKSVTHKIIRGKEGKFANRHRDEGWITPSARQLVQMHMNDLKSMCRILPISHVTLERVAFDFQKLENENIKAWEYGKGKLYGYNSPEEYIHDVQGGKCLICGKPHIDYLHHIIPRSKGGSNKVSNLAGLCYDCHYGPMGVHNCQDTQDRLPELKNEANKQYKVSLLNSVMPVLIEEMDKFCKANSIIFSICGGHDTGKVRDMYDLQKDHCIDGFAISLAGRNVKSVDVMPDRIHQKQRYKKKSKNIIQKRNCREYYDGKKLAAVNRHKGTDQKADSLEEYMNTYAETHTADECKKHFESLTVKPARRTYTFHKEGRICPFHIGDKVRYEKKNKIKGNTKVETFICEGIRFPKDENKAKVEHNKTKSKKMKFCRVLEPGCTPYIDYRKLVLI

SEQ ID NO: 19438 - protein, 451 aa, unidentified; identical to SEQ ID NO: 5203

SEQ ID NO: 19439 - protein, 423 aa, unidentified; identical to SEQ ID NO: 4062

SEQ ID NO: 19440 - protein, 424 aa, Moorena sp.
MRVFVLDKNKKPLDPCQPARARILLKQGRAKVFRRYPFTIIMRDLEELECVTHNHQIKLDPGSQTTGLAIIQEKVVVWGAELTHRGLQIRDGLTSRRKLRRSRRNRKTRYRQPRFLNRKRPDGWLAPSLMSRVYNILTWVKKLTRFCPITGISQELVRFDTQKMENPEISGTEYQQGTLYGYEVREYLLSKWNRKCAYCGVTDTQLEVEHIKPKSKGGSDRVSNLAIACRKCNQIKGNQEIEQFLSGKPDVLKRILSQAKRPLVDAAAVNSTRWKLYNELKALGLPIETGSGGLTKYNRCRQNLPKTHWLDAANVGEVDTLYIESYQPLLISAKGHGTRQMCRTNKFGFPTRYVPRFKFVKGFQTGDIAKAVVTKGKKIGTYTGRIATRKTGSFNISTKHELVQGISHKYCSIVHRKDGYSYSF

SEQ ID NO: 19441 - protein, 470 aa, unidentified; identical to SEQ ID NO: 7284

SEQ ID NO: 19442 - protein, 420 aa, unidentified; identical to SEQ ID NO: 6235

SEQ ID NO: 19443 - protein, 426 aa, Parasutterella sp.; identical to SEQ ID NO: 3045

SEQ ID NO: 19444 - protein, 415 aa, Bacillus sp.; identical to SEQ ID NO: 2431

SEQ ID NO: 19445 - protein, 426 aa, Microcoleus sp.
MSKPNYVLVVDTNRKPLNPCTPGVARSLLKAKKAKVFRRYPFTIILNQAVENKPKPMQLKLDPGSKTTGIALLQEEKVVWAGELTHRGQQIKDSLESRRALRRGRRHRKTRYRKARFLNRSRLKGWLAPSLQHRVETTLTWVNRLRRYAPITGISQELVRFDLQKQDNPEISGIEYQQGTLFGYEVREYLLAKWERKCAYCGVENVPLQVEHIHPRAKGGTDRVSNLCLSCEPCNLKKGTQDIEVFLRNKPDVLSHVLTQAKRPLKDAAAVNSTRWALFNRLKQTGLPVETGSGGKTKYNRIRLELSKHHYIDAACVGNVDNLQILTTQPLLIKATGHGTRQMCRTDKFGFPSRHVPRNKFVRGFQTGDIVKAAVTQGKKIGLYVGRVAVRSTGSFNISDKTGLVQGISHKYCQVVHRKDGYNYAC

SEQ ID NO: 19446 - protein, 338 aa, unidentified; identical to SEQ ID NO: 7376

SEQ ID NO: 19447 - protein, 406 aa, unidentified; identical to SEQ ID NO: 3980

SEQ ID NO: 19448 - protein, 371 aa, unidentified
LSKVKTMRVFVFNMRGRPLMPCSQRKARLLLRENKAMIYKYHPFTIQLTYTTGETKQDCHIGIDTGSKYIGAAVRSEDKVFWKGEIELRQDIRSNLDTKRIYRRSRRNRKTRYRKPRFLNRKRRDEWLPPSLQSRINHTFHWIDTLSSLVPNPILHIEVGKFDVAKMINPEIHGVDYQHGQTYGFFDERYFVFARDNYTCQCCGKSKNKILNTHHIIYRSNGGTNRVDNLITVCTDCHTSQNHRKGGIFYQWQEQHKKVKQYKEPPFMNTLRKRIFVAYPDAEITYGSETTPKRKAMKLDKTHYNDAIVISGINEIKENPEEWLLIKQFRKKKRSLHEATARKGRKKPNRNQTRNSKNTPYYKGFYLNDKV

SEQ ID NO: 19449 - protein, 451 aa, unidentified
MSVAVISKTGIVLMPTSEYRARKLLDSGKAIIYGYRPFTIQLTERETGDVQPVELCVDTGYIHIGVSVKSEKHEYLGLQVDTLTDEKAKHDDRRMYRRQRRNRKRYRKSRFDNRKRKSGWLAPSLEHKKEINLQIITAICGVYPIADITLEIGNFDTQVLKAKEEGKQIPQGTDYQHGERYGIATLREAVFTRDGYKCQCCDRGIKDGAILHAHHIQYRSQGGTNRMSNLITVCEKCHTPANHKPGGKLYGWKPKIASFKDATYMTAVRWQLYRKVKEMFPGIHVKITYGAETKERRRILDIKKSHVNDAFVMGQFHPKHRSLPVLYKKKRRNNRCLEKFYDAKYIDSRNGKTRSGQELFNGRISRNHKKDSENLHRYRKKKVSRGKRNIRVQRYKIQPHDIVLFDGKKYETTGCHNKGTRAILLPEKKSKSVEKLTIYKYAGGYYPSKFA

SEQ ID NO: 19450 - protein, 411 aa, unidentified; identical to SEQ ID NO: 3917

SEQ ID NO: 19451 - protein, 415 aa, unidentified; identical to SEQ ID NO: 2744

SEQ ID NO: 19452 - protein, 442 aa, unidentified; identical to SEQ ID NO: 2834

SEQ ID NO: 19453 - protein, 512 aa, unidentified; identical to SEQ ID NO: 11891

SEQ ID NO: 19454 - protein, 411 aa, unidentified; identical to SEQ ID NO: 6901

SEQ ID NO: 19455 - protein, 424 aa, unidentified
MRVFVFNMRGRPLMPCSQRKARLLLRENKAMIYKYHPFTIQLTYTTGETKQDCHIGIDTGSKYIGAAVRSEDKVFWKGEIELRQDIRSNLDTKRIYRRSRRNRKTRYRKQKFLNRKRRDEWLPPSLQSRINHTFHWIDTLSSLVPNPILHIEVGKFDVAKMINPEIHGVDYQHGQTYGFFDERYFVFARDNYTCQCCGKSKNKILNTHHIIYRSNGGTNRVDNLITVCTDCHTSQNHRKGGIFYQWQEQHKKVKQYKEPPFMNTLRKRIFVAYPDAEITYGSETTPKRKAMKLDKTHYNDAIVISGINEIKENPEEWLLIKQFRKKKRSLHEATARKGRKKPNRNQTRNSKNTPYYKGFYLNDKVSVFGKSGYITGFTSNAAYIKDENNDYITLPNKTYKQVSINKMKLECHNNNWQYIIKNAV

SEQ ID NO: 19456 - protein, 422 aa, unidentified; identical to SEQ ID NO: 11648

SEQ ID NO: 19457 - protein, 426 aa, unidentified
LAKDHYRSIDREETNLRVYVLNKRGEPLMPCSAAKARILLKEKKAKVKRRTPFTIQLTIATGETKQPVTLGVDSGYRHVGLSASTEKAELYASEIELRQDIPELLAARRALRGARRSRKTRYRAPRFDNRKRDKGWLAPSVENRIGAHVSRVEAVLRILPVTKIIVETASFDVQRIKNPDVQGVEYQEGEQLGFWNVREYVLFRDGHECQHCHGKSKDKVLNVHHIESRRTGGDAPNNLITLCETCHKAFHRGEIELKVKRGRSFQAETFMGVMRWSFFERLRASHPEIEVRNTYGYLTKDTRIANKIEKTHCADAFCIAGNLKAKRLGYYFFQKQTRRHNRQIHKLTILKGGVRKRHQTPYEIKGFRLYDKVLYRGKEAFIFGRRSSGYFDIRTLDGERISAAVNSKKLRLLEKRRTFLIELRRN

SEQ ID NO: 19458 - protein, 413 aa, unidentified; identical to SEQ ID NO: 3924

SEQ ID NO: 19459 - protein, 417 aa, unidentified
MPCSPAKARLLLKERKAIIKRRTPFTIQLTIATGEAKQPVTLGVDSGYKHIGLSATTEKAELYASQVELRQDITDLLSARLALRRSRRSRKTRYRAPRFDNRVASKREGWLAPSVENRIAAHMSRVEAVMRVLPVTAITVETAAFDTQLLKNPDVAGAAYQQGEQLGFWNVREYVLFRDGHVCQHCRGKSKDPILNVHHIESRRTGGDAPNNLITLCETCHKAFHRGEIKLKVRRGKSFKAETFMGIMRWTLFERLKKAHPELRVRNTYGYLTKHKRISYGIAKSHRADAYCIADNLGAKRLEGFFFQKQTRKHNRQLHKLSILKGGLRKKNQAPYEVKGFRLFDKVICKGEEAFIFGRRTSGSFDVRWLDGTRISAGINYKKLRLLEPRTTYLTEFRKEAALPPLHECRGFRAELL

SEQ ID NO: 19460 - protein, 353 aa, unidentified
GIDDGGLHVGVALVQKCHTRNKVIFKGVIEQRNDVKHLMDVRRGYRRYHRYHKRYRPARFNNRNSSKREGRITPSILQKRQATIRVVNQLNKWINITNYWLEDVAIDIRALTDGYKPYRWQYQKTNRLDENIRKAVILRDGCKCMECGKSNCRLEVHHIKPKRLKGSNTLGNLITLCAKCHQKTESVEELYMDRYFALLKSSDNKNLNYAQHVMIGKKWLREQLSNLGMLHLTNGGDTANKRIDWDITKSHSNDAICITDLKPDTCEIKEWVIKPMRRQSKAKADNVLGIKHRDLVEYTFRNGETHRGYVTALYPEQNAINFQSPTKHCKKVNARKCKVLWKYSKIYWLDNVS

SEQ ID NO: 19461 - protein, 279 aa, unidentified; identical to SEQ ID NO: 5082

SEQ ID NO: 19462 - protein, 440 aa, Sutterella sp.
MSTGLRAEQAEPAGIRKGDTLKVFVLNMRGKPLMPCSPAKARHMLKAGKAVVLRRTPFTISLTVATGETKQEVTLGVDAGAEHVGISATTEKEEVFASEVELRQDIKGLLADRLEFRRARRNRKTRYRAPRFDNRVRSKHKGWLAPSVENRIQAHISRIEAVCRVLPITKIVIETASFDIQKIKNPEVEGTDYLQGDQLGFWNVREYVLFRDGHVCRHCRGRSKDPFLNVHHLESRKTGGDAPNNLITLCETCHKAYHAGKIKLKARRGTPFRAEAFMGIMRWTLLERVRKAHLELPVENTYGYLTKHKHIVLGLPKTHCADAFCIAGNLSALRRGEFLYQRQTRKHNRQIHKCSILKGGVRKLHQAPFLVKGFRLFDKVKCKGRIGIIFGRRSSGYFDVRTLDGVRLSAGISSKKLMLLEKQTTFLTQLRKEVGASSPS

SEQ ID NO: 19463 - protein, 419 aa, unidentified; identical to SEQ ID NO: 8136

SEQ ID NO: 19464 - protein, 424 aa, unidentified; identical to SEQ ID NO: 4676

SEQ ID NO: 19465 - protein, 415 aa, Bacillus sp.; identical to SEQ ID NO: 7196

SEQ ID NO: 19466 - protein, 440 aa, unidentified
MSTGLRAEQAEPAGIRKGDTLKVFVLNMRSKPLMPCSPAKARHMLKAGKAVVVRRTPFTIKLTIATGETKQDVTLGVDAGARHVGISATTEKEEVFASEVALRQDITGLLADRLAFRRARRNRKTRYRAPRFNNRVRSKNKGWLAPSVENRIQAHISRIEAVCRVLPITKIVIETASFDIQKIKNSEVEGSGYQQGDQLGFWNVREYVLFRDGHVCQHCRGRSKDPILNVHHLESRKTGGDTPNNLITLCETCHKAYHTGKIKLKARRGTSFRAEAFMGIMRWTLLDRVRRAHPELPVENTYGYLTKHNRIALALPKTHCADAFCIAGNLNALRRGDFLFQRQTRTHNRQIHKCSILKGGVRKLNQAPFLVKGFRLFDKVKCKGGIGFVYGRRSSGFFDVRTLDGVRLSAGISYKKLMLVEKRTTFLTQLKKEHGASSPS

SEQ ID NO: 19467 - protein, 451 aa, unidentified; identical to SEQ ID NO: 10609

SEQ ID NO: 19468 - protein, 396 aa, unidentified; identical to SEQ ID NO: 4508

SEQ ID NO: 19469 - protein, 422 aa, Sutterella sp.; identical to SEQ ID NO: 3542

SEQ ID NO: 19470 - protein, 475 aa, unidentified; identical to SEQ ID NO: 4985

SEQ ID NO: 19471 - protein, 420 aa, unidentified; identical to SEQ ID NO: 8934

SEQ ID NO: 19472 - protein, 420 aa, unidentified; identical to SEQ ID NO: 3288

SEQ ID NO: 19473 - protein, 433 aa, unidentified; identical to SEQ ID NO: 6602

SEQ ID NO: 19474 - protein, 413 aa, unidentified; identical to SEQ ID NO: 7036

SEQ ID NO: 19475 - protein, 470 aa, unidentified; identical to SEQ ID NO: 2825

SEQ ID NO: 19476 - protein, 408 aa, unidentified; identical to SEQ ID NO: 5302

SEQ ID NO: 19477 - protein, 423 aa, unidentified; identical to SEQ ID NO: 3951

SEQ ID NO: 19478 - protein, 453 aa, unidentified; identical to SEQ ID NO: 5738

SEQ ID NO: 19479 - protein, 450 aa, unidentified; identical to SEQ ID NO: 2935

SEQ ID NO: 19480 - protein, 490 aa, unidentified; identical to SEQ ID NO: 7139

SEQ ID NO: 19481 - protein, 394 aa, unidentified
LMLQSGQAKVIKRCPFTIQLTYNTGHQAQEISLGIDAGSKHIGVSATTKTRVLYEADVELRNDIVDLLSSRRELRRGRRNRKTRYRPARFDNRRREDGWLAPSIRQKIGTHLTVVENICKILPISRITVETASFDIQKIKNPDIQGAEYQQGDQLGFWNNREYVLFRDNHTCQCCKGKSKDKILNVHHIESRKTGGNAPNNLITLCEICHTGYHKGAIQLPKTVKRGMRFKDAAFMGIMRWAFYEALKQQYEPVGTPVHNTYGYITKHTRIEHNLPKEHYVDARCISGNPDAFPNGEYYYQKKVRCHNRQMHKLTILKGGIRKQNQATYLVKGYRLFDKVSYQRKEYFVFGRRKSGFFDIRTLSGKQVNKGSLSCKKLKFIATRMYYLIERRAV

SEQ ID NO: 19482 - protein, 424 aa, Caldicoprobacter sp.; identical to SEQ ID NO: 2397

SEQ ID NO: 19483 - protein, 517 aa, unidentified
VVYSHLLTRALRKETAMPANIYVLNHDGIPLMPSHSYGRVKRMLHTGKARIVGTKPFTIRLTYQINTPAIQPVILGMDPGRTNIGNCAVETSGEVLYASLVETRNKEIPKLMEERKGHRQMSRRGERKRLQRRAIRADKTGMARATEYWRMLTGQKKPIRCKVIRNQEVKFQNRKRPIGWLTPTAEQLARTHLNVVRKIQKILPVSAVVIEINRFDFARMENPDIENWEYQQGRLAGYADVREAVSRQQKGKCLLCGRKQIEHYHHIVPKSRGGSESIDNYAGLCMTCHEKVHQDEIARGKLQSKKKGIQKKYHALSVLNQIMPVLLRELPKLVPAFITTGYETHRIRDSVGLQEKQKDDDTHYMDAWCIAMSIVGTYETEPDFSGLYRMKQFRRHDRAKIKAQKERTYYHNGKAVAKNRHKRTGQADAKVPFPSLAEYLQEHPEHKGRLTVRKSTRSYNNTKRNLPGTVYTEYGNPFVLRATQSNGTRLYGMGEGMDYHKTVRCKLSQHNAGLVYI

SEQ ID NO: 19484 - protein, 420 aa, unidentified
MQYVYVLNKHGEPLMPCSPGKARLLLKRQKACVVKRTPFTIKLLHGSAGYKQPITLGVDAGSKHVGLSASTEKRELYSEEFTPRNDVVELLSTRRQNRCSRRNRKTRYRTPRFNNRVHSKHKGWLAPSVEVKIQEHITVIKRICRILPITLVRVETAEFDTQRLKAMLAGKPLPVGTDYQLGEMYDEYNVRQYVLKRDNYTCQCCGAHTTAKKAIKLHVHHLESRKVGGNAPSNLITLCTACHDNLHKGKVTLDGKKRGKTLRDAAFMGIMRNTLLIRLRNELNIPVQNTYGYITKLLREQNDIKKSHINDARCISKHPLAEPCSVCYRTKAIRHHNRQIHKAKILKGGIRKANQAPYIVKGFRLWDKVLYNGQECFISGRRSSGYFALKKLDGTAITNSISFRKLRLLEPAINYLIERM

SEQ ID NO: 19485 - protein, 418 aa, unidentified
MIYVRSKEGKALMPSERGGRIGYLLRHGKAHVVSRVPFVVQLDYESTTYTQEVSLGIDAGSKHIGVSASSERKELLAAQVELRSDVVNLLSTRRELRQTRRNRKTRYREQRFYNRKKKDGWLTPSVEQKVESHLKVIRLVHKLLPITKTTIEVAQFDAQKIKNTDIKGNEYQQGEQMGFWNVREYVLARDGHKCVHCKGKSRDPILNVHHLESRKTGGNSPSNLVTLCETCHKAYHRGEFELKIKRGTTLRDAAVMNIMRWAVYEQAKEEFRNVHLTYGYVTKHTRIENGITKTHAADAFCIAKNVHAIRLGTFFMCRCVPRHTRALHVANPKKGGIRRSCIASHKIGKSRFQRFDMVRWKGKECFIFGSTKGRPVLRDIKGIKMHENNSVNIKTISFLKRLRKNIIVEERTFESRII

SEQ ID NO: 19486 - protein, 440 aa, unidentified
VFVLDKRKKPLMPCSEKRARKLLDAGRAVVVRVVPFTIRLKDRVGGEVQPLQVKLDPGSKTTGIALVRVEDEADPESGEMRRTVHPLWLGHLQHRGAAIREALQARRALRRRRRSQNLRHRAPRFDNRTRPEGWLAPSLRHRLETTLSWVQRLCRWTPVSALAVERVRFDMQAMQNPEITGVEYQQGTLHGYTVREYLLEKFQRQCAYCDASDVSLQVEHVQPRALGGSDRVSNLALACPPCNQKKAAQPVEVFLAKQPERLAKLRRQLKTPLHDAAAVNSTRNAIVQVLRKSGLPVEASDGGRTKYNRLALSVPKIYALDAACVGRVDAIGLWQRPVLGIKATGRGSYQRTRLDGSGFPRGYLTRSKWHYGFQTGDRIRAEVQTGKKAGSYTGRAAVRATGSFNIQIAGQPAVQGINHRHCRLIQRADGYGYAFQPKAA

SEQ ID NO: 19487 - protein, 406 aa, unidentified; identical to SEQ ID NO: 6079

SEQ ID NO: 19488 - protein, 512 aa, unidentified; identical to SEQ ID NO: 5811

SEQ ID NO: 19489 - protein, 430 aa, unidentified; identical to SEQ ID NO: 4504

SEQ ID NO: 19490 - protein, 418 aa, unidentified; identical to SEQ ID NO: 4950

SEQ ID NO: 19491 - protein, 413 aa, unidentified
LKVFVLNMRGKPLMPCSPAKARHMLKAGKAFVVRRTPFTIKLTIATGETKQDVTLGVDAGARHVGISATTEKEEVFASEVALRQDITGLLADRLAFRRARRNRKTRYRSPRFNNRVRSKHKGWLASSVENRIQAHMSRIDAVCRLLPVTKIVIEAASFDVQKIKNPTIEGTDYQQGDQLGFWNVREYVLFRDGHVCQHCHGRSRDKILNVHHLESRKTGGDAPNNLITLCETCHKAYHAGKIKLKVKRGQSFRAEAFMGIMRWTLLDRVRKTHPKLPVENTYGYLTKHKRIALGLPKTHCADAFCIAGNLKALRRGDFLFQQQTRKHNRQIHRCSILKGGVRKLNQAPFLVKGFRLFDKVRIGGQIGFVFGRRVRGTFNIRRLDKTVIGTDINCKKLSLLETRKTFLTELRKE

SEQ ID NO: 19492 - protein, 509 aa, unidentified; identical to SEQ ID NO: 5057

SEQ ID NO: 19493 - protein, 515 aa, unidentified
MTALEEKLSKTEYIYVLGFDGKPQMPTRRKRHVLKLLKTGRARIAEDIPFTIRLTYRNAPVLQPVTLAEDPGRTNIGAAVLSPLGDLLFAAVIETRNKEIKKLMADRQKSRQASRRGERKARQRLAKRYGSMVKSGMVMRKLPMYAADKFVICKFIRNTQARFCNRKRCPDWITPTVQHLVQTHLNIIRKISRYLPVTDIAFEVSRFAFMHMENPEAMGVDFQNGPLKGYGDVKEAIRTQQHGKCLMCKKPISHFHHIVPRSRGGSDTIQNLAGLCTECHTKVHTDTAFRKDFDEKKSGQLKKYGALSALNQAVPFICKKLLEEYGKEHVHFCRGLDTSLIRTALGFEKTKKNQMHEVDAYCIGLAALEVNEVETPAFDHTFQIRQFRRQDRSIIHHQTGRSYYQGKEKVAQNRKPGFEQKTTALSQWYEEQVRIHGEKESEKLRSQLRVEKSCRHYNDMDRFLPGAVFLYEGKRYVLSGRITNGKYLRACGQGMKNFPAAECTFIRHNAGLVFI

SEQ ID NO: 19494 - protein, 418 aa, unidentified
MVYVINKQGQALMPTERFGKVRRLLKNSLAHVVCRIPFTIQLDYDTTDYTQPVSLGIDAGSKHIGISATTSEKELYAADVELRNDIVDKLSTRRELRRTRRSRLRYRKARFNNRVSSKRKGWLAPSVENKIQTHLTVVEKIHKFLPITNIVVETASFDIQKINNPSISGSEYQQGEQLDFFNVREYVLFRDNHTCQHCKGKSKDKVLNVHHIESRKTGGDSPNNLITLCETCHKAYHRGDFELNVKRGKSFRDAAFMGIMRWGFYDRLKNIYPNVSMTFGYITKNTRITNNLPKEHYVDARCISGNPVAKPLGYYFYQKKVRCQNRQIHKANFLKGGRKKLNQAPFLVKGFRLFDLVEYQKELYYIFSRRNSGYFDIRKLDGTKVNKGSINCKYLRLVHKRKSILIEKRMQGAISPIN

SEQ ID NO: 19495 - protein, 518 aa, unidentified; identical to SEQ ID NO: 3878

SEQ ID NO: 19496 - protein, 418 aa, unidentified; identical to SEQ ID NO: 5466

SEQ ID NO: 19497 - protein, 408 aa, unidentified
MVYVQDINGKPLMPTTRHGKVRRLLKDKKAVVVNLCPFTIKLTYVTSDYKQEIVLGVDAGTKHVGLSATTKSKELYSSEVILRNDIVDLLSTRRELRRTRRNRLRYRKHRFNNRIKSRRPGWVAPSVRYKIDAHIRVIDNVCSILPISRIVIEVAQFDTQKIKNPNISGKEYQEGDQLGFWNTREYVLCRDGHKCQYCKGKSKSKILNVHHLESRKTGGDSPSNLITLCETCHKEYHKGNIDLKIRKGKSLRDAAVMGIMKWRLYEKLKSKYGCVSMTFGYVTKYNRIHNNIEKSHVSDAFVISKNFNAIRLGYYYKIRLVRRHNRQIHKQKIQKGGIKRLNQSPFEVFGFRLFDRIMFENSYYFIFGRRKIGRFNIRDIDGKSQRDITYSKLKLSRCKRFMIQKEMN

SEQ ID NO: 19498 - protein, 408 aa, unidentified; identical to SEQ ID NO: 8232

SEQ ID NO: 19499 - protein, 434 aa, Selenomonas sp.; identical to SEQ ID NO: 12372

SEQ ID NO: 19500 - protein, 423 aa, unidentified; identical to SEQ ID NO: 6814

SEQ ID NO: 19501 - protein, 420 aa, unidentified; identical to SEQ ID NO: 2681

SEQ ID NO: 19502 - protein, 502 aa, unidentified; identical to SEQ ID NO: 2616

SEQ ID NO: 19503 - protein, 413 aa, unidentified
MSTCVCVLSNSGERLMPTIRLGKVRRLLKDGKAKIVKHHPFTIQLLYDSKTNTQPIEICEDVGYNYIGISVKSQSHEYVSAQYDTLQDEKACHDSCRKLRRTRRNRLRYRKPRFDNRKRGEGWLAPSLRHKKELNVNVVKMYCAVMPITHATVEVGSFDTMLVKAIQEGKAIPEGADYQKGPRYNLATLREAVFYRDNYTCQVCGRKVADGAILHMHHMFYWKGRHGDSLNELLTVCEKCHTPANHQKGGKLYGFGENVKFADLSGAAFMNTVRWQIVNKLYAAFGKDFVTVTYGAMTKEKRIALRLEKSHNNDAYAMGEFHPNCRYTFEHYEKVRRNNRILEKFYDSRYIDIRTGEIATGKELFNGRINRNHKKDSENLHRYRGKRTYAGHRALLRKKVNLNPGDLVSLNGE

SEQ ID NO: 19504 - protein, 406 aa, unidentified
MVYVQDIDGKPLMPTTRHGKVRRLLKSNKAVVVNLCPFTIRLTYISDSYKQEIVLGVDAGTKHVGLSATTKSKELYSSEVILRNDIVDLLSTRRELRRTRRNRLRYRKPRFNNRVKNKRPGWIAPSVRYKVDAHIRVIDNVCSILPISRIVVEVAQFDTQKIKNPDISGKEYQEGDQLGFWNVREYVLARDGHKCQYCKGKSKDSILNVHHIESRKTGGNSPSNLITLCETCHKEYHKGNIKLKVKRGTSLRDAAAMGIMKWKLFDKLKSLYPNVSMTFGYITKHNRIKHEIKKSHISDAFVISKNFEAKRPGYYFKEKLVRRHNRQIHKMKILKGGKKKMNQAPFKVFGFRLFDKVEFQGNEYFIYARRLSGYFNIRDINSENKKDVTYKKLTHIGHGLISVETG

SEQ ID NO: 19505 - protein, 512 aa, unidentified
MSTVYVLNKNGKPLMPTTRCGHIRYLLKEKKARVVTSKPFTIQLLYETDDVVQPLYLGIDPGRTNIGVAVVKTDGTAVFTAHLETRNKEIPKLMKKRKDSRRARRTNGRRCRRQRRAKANDTISKKCVKQATAQNGSVSKRAKEIGVIKRHLPGCEKEVLCIGIKNKEAKFSNRTRPEGWLTPTANQLLQTHINLVKKIRKFLPISDVVLEVNKFAFMRLDNPNVQKWQYQQGPLYQKASLEEAVSEMQERHCLFCKKPIAHYHHVVPQSENGSNTIDNIVGLCTKHHDLVHKDTTWQKKLAKKKTGLNKKYGAQSVLNQIIPALTERLNTLFPKHFFVTTGKSTYDYRAAHGVSKDHWLDAYCIACSVLPNDVCDSGINNRVPYELKQFRRHDRRALHKANMSRVYTLNDKAVATNRHKAIKQTTDSLEEFRQNHPDDVYKLKVKEHHPEYRNPKRNFPGCVFLVGKHTHVMQGTSGSHNGKADGYYDTNGNSYSSGKCKFVAKNEGIVFT

SEQ ID NO: 19506 - protein, 427 aa, unidentified; identical to SEQ ID NO: 18817

SEQ ID NO: 19507 - protein, 449 aa, unidentified
  REGION 1..449: note = IscB polypeptide
MQKLSKRNTYKPTDSSLVCSSLTVSLNRDESLSEHGLKTFDNSLEGNQRPRTGGTKCIVYVQNKDGRPMMPCTPAKARHLLGAGNARVIQRNPFTIILSWQCEYNVQDITLGIDTGSKFIGFSAITTNKEVLSGTVILDTMQKKRLDKRRNYRKTRRSKKWYRKPRFLNRTKPKGWLPPSIERRYQAHLKIIEKIKHLLPITKTIIEIAQFDIQKLKNPETKGKEYQQGDLYEYSNKKLYIFAREKYTCQLCNKSTVGKKTNLHHIIPRGKGGTNKPNNLALLHKDCHKRLHKQNLHKKLNRPKQYREHTFMSIIAKRFKESPECRVTYGYKTHTDRNKQGLPKTHYNDAFIIAGGRIQERSSTQSVKQTKRNNRSIQKNRKGFAPAIRIQKFPIQPNDLVEYGGRTYRAKGTHCKGTRVVLEMYPKNRSININCLHQITYGKGLQFVA

SEQ ID NO: 19508 - protein, 529 aa, unidentified; identical to SEQ ID NO: 8434

SEQ ID NO: 19509 - protein, 470 aa, unidentified
MSVFVVGLNGCRLMPVSERKARLLLKQGKAFVEQKVPFTIRLNYKTGSTTQLGYLGIDTGSQHIGVSVVREDGTVLHKEEIGLRDSMSKRKLLEAKASLRRGRRYRKTRYRHPKWRPKTKRVYCEVPDRKGRHWQKKKITFTSKRPKGWLPPSLQSKTDHHIRWIKKLQDLLPEGYRLSIELGRFDPARMKNPEIHGDLYQKGPQYDYENVRAYVLDRDRYTCQICKKKGGKLHVHHILYRSHGATDDPQYMVTVCSDCHSAQNHLPGGILYQWMQEQKRFSRGLRDATFMNILRKRLIRAFPEAVFTYGNVTKVDREKLKLPKSHGNDATAIALVKTGITAVKDKESVICIQQVRRKKRSLHEETPRKGRKEPNRTAARNNKNTKAVTVTKRQNKKKVSMTGCLFDRVELNGKKGWISGFTGKSCYVKDADDQYLSTSPKYKQVSLSKLRILHHCGNWIIGAKKTLGKG

SEQ ID NO: 19510 - protein, 485 aa, unidentified
  source 1..485: note = Oxalobacteraceae bacterium UBA5157
VPDGFRCFQERCILSVFVLDQKLRPLMPCREKRARKLLAAGRARIHRLYPFCIRIVDRALEDSVLQPLVIKIDPGSKVTGLAVCRISEAVDDDGVVAPVMHIQFLMELLHRGQTIKQSLHARSSMRRRRRGNLRYRQPRFDNRTRQAGWLPPSLLHRVLTIETWVNRIRNMAPITQIAQELVRFDMQKMQNPEIAGIEYQQGTLAGYELREYLLEKWNRECSYCGAKDLPLQMEHIVAKANGGSNRASNLCLGCESCNQKKGAKDIRAFLKNDPIRLAQILKHAKMSLRDAAAVNATRNALLKVLKATDLPVETGTGGRTKWNRSRLGIVKTHALDAACVGVVADVVSINAPALQITCMGRGTHSRTLLDQYGFPRTTLPRTKTFFGFKTGDMITAEVTKGKRIGSHKGRVAVRSSGYFNIQSGIKGMKAVQGIPHKDCRIAQRADGYNYLWKSVSDQPKAKASTAVQSAPCLTALKDGVSRSIF

SEQ ID NO: 19511 - protein, 428 aa, unidentified
LKVFVLNMRGQPLMPCSPAKARHLLKAGKAAVRRRTPFTIQLRIATGETKQSVTLGVDAGAKHVGLSAATEKEEVFASEVELRQDITGLLAARLSLRRERRQRKTRYRAPRFLNRVRSKHKGWLAPSVENRIQAHMSRIDAICGLLPVTKIVIETASFDIQKIKHPDVEGTDYQQGDQLGFWNVREYVLFRDGHVCQHCHGHAKDKILNVHHLESRQTGGDAPNNLITLCETCHKACHAGKIKLKVKRGQSFRAEAFMGIMRWTLLDRVRKAHPGLPVENTYGYLTKNTRITLGLPKAHCVDAYCIAGNLKAVRRGVYLHQRQVRKHNRQIHKCTVLSKTLKDGTKIGYRKLNQTPHLVKNFRLFDKVRCLGQTGFIFGRRSSGYFDVRRLDGVKISSCINYRKLTLLEKRGTCLTELRKEDGASSPV

SEQ ID NO: 19512 - protein, 420 aa, unidentified; identical to SEQ ID NO: 15202

SEQ ID NO: 19513 - protein, 402 aa, Arthrospira sp.; identical to SEQ ID NO: 18468

SEQ ID NO: 19514 - protein, 452 aa, unidentified
VTLAEDPGRTNIGLAALSLKGDLLFSAKVETRNKEIAKLMDKRRQSRRASRNGERKARQRLARKFGTMLKAGMLMRKLPQYAADKFITCHVIRNTQARFSNRKRPDGWLTPSARHLVQTHINLVHKMGRYLPVTDVALEVNRFAFMQMEDPSISGVDFQNGPLKGFDDLHAAVRDLQDGKCLLCKKEIEHFHHIVPRSRHGSNTIGNIAGLCTKCHEKVHKDEKAGKRLKDKKKGLDKKYGALSILNQAIPFICKELETEFGKEHVHYCTGRETALLRRSLGYHKTKKEQYHEVDAWCIGALSLDSIPEKAPDFTDVHTVIQFRRQDRALIQAQTSRSYKLDGETVAWNRKKRTDQKNDSLEDWYQKQVQLHGQKEADRMRSRLTVKISQRRYNNPERMLPGAVFLYKGKRYVMKGQHCNGVYLQAVGMGSRDFPVKECTIIKRNQGLVFLS

SEQ ID NO: 19515 - protein, 303 aa, unidentified
LRYRKPRFDNRIKSKRPGWVAPSVKYKIDAHIRVIDNVCSILPISSIVIEVAQFDTQKIKNPEILGKEYQEGDQLGFWNTREYVLARDGHKCQYCKGKSKDKILNVHHLESRKTGGDSPSNLITLCETCHKEYHKGNIDLKIKRGSSLRDAAVMGIMKWKLYEELRSRYDRVSMTFGYITKHNRIKYGIEKSHTSDAFVISMNINAKRIERQYLKRLIRRHNRQIHKMKILKGGKKKNNQAPFEVFGFRLFDKVLYNNKILFVYGRRKSGSFNIRDFNGENSKDVSRKKFKLIRGKRHPIILK

SEQ ID NO: 19516 - protein, 425 aa, Moorena sp.; identical to SEQ ID NO: 17946

SEQ ID NO: 19517 - protein, 512 aa, unidentified
MSTVYVLNKDGKPLMPTTRGGHVRHLLKEQKARVVRTNPFTIQLLYETDNLVQPLYLGIDPGRTNIGVAAVKADGTAVFTAHLETRNKEIPKLMQGRKKARRARRTNGRRCRRQRRAKANGTISKKCVKNDTAQNGSVSKRAKEIGVIKRHLPGCEKDVLCIGIKNKEAKFSNRTRPEGWLTPTANQLLQTHINLVKKIQKFLPISDVVLEINKFAFMRLDNPNVQKWQYQQGPLYQKASLEEAVSEMQEHHCLFCKNTIDHYHHVVPQSENGSNTIGNIVGLCTKHHDLVHKDTSWQEKLAKKKTGLNKRYGALSVLNQIIPALTKELSSLFPKHFFATNGKSTYDYRAAHGVSKDHWLDAYCIAGSVLPNDACDNNINNHVPYELKQFRRHDRRALHKENMGRVYTLNGKSVATNRHKAIKQTTDSLEEFRQRQPNDVCKLKVKEHHPEYRNPKRNFPGCVFLVGKHTHVMQGTSGSHNGKADGYYDTNGNSYSSGKCKFVVKNEGIVFT

SEQ ID NO: 19518 - protein, 448 aa, unidentified
MSTGLRAVQAEPAGIRKGDALKVFVLNMRGRPLMPCSPARARHLLKAGKAVVRRRTPFTIQLRIATGETKQSVTLGVDAGAKHVGLSAATEREEVFASEVELRQDITGLLAARLSLRRERRQRKTRYRAPRFLNRVRSKHKGWLAPSVENRIQAHMSRIDAVCRLLPVTKIVIEAASFDVQKIKNPTIEGTDYQQGDQLGFWNVREYVLFRDGHVCQHCHGHSKDKILNVHHLESRQTGGDAPNNLITLCETCHKACHAGKIKLKVKRGQSFRAEAFMGIMRWTLLDRMRKAHSGLPVENTYGYLTKNTRITLGLPKTHCVDAYCIAGNLKAVRRGVCLHQRQVRKHNRQIHKCTVLSKTLKDGTKIGYRKLNQTPHLVKSFRLFDKVRCLGQTGFIFGRRSSGYFDVRRLDGVKLSSGISYRKLTLLEKRSTYLTELRKEDGASSPV

SEQ ID NO: 19519 - protein, 377 aa, Parasutterella excrementihominis
TGRKTEETNLRVLVWNKRGKPLMPCSPAKARLLLKEKKAIVVRRTPFTIQLTIATGESKQPVSLGVDAGYKHVGLSASTEKAELYASEVELRQDITDLLSARRALRQSRRNRKTRYRAPRFDNRIRTKRKGWLAPSVENRINAHLSRIETVIRLLPVTKISVETTSFDMQLLKNSDIAGKEYQESEQLGFWNVREYVLFRDGHVCQHCHGRSKDPVLNVHHLESRRTGGDSPGNLITLCETCHKELHRGEITLKAKRGQSFRAETFMGIMRWEVLDRLKASHPKLEVQNTYGYRTKHARIVNGIAKSHCADAFCIAGNLGAERLGEFLFQKQTRRNNRQIHKLSILKGGIRKRNQVPFEVKGFRLFDKVACKGEEGF

SEQ ID NO: 19520 - protein, 443 aa, unidentified
NIGEGSQPVERPRRQNLRVFVLNKRGKPLMPCSPAKARLLLKEKKAIVKRRTPFTIQLTIATGETKQPVGLGVDAGYKHVGLSASTDKAELYASQVELRQDITDLLSARRALRRARRNRKTRYRAPRFDNRIRTKRKSWLAPSVENRINAHLSRIEAVLRLLPVTKITVETASFDTQLLKNPDIAGKEYQEGEQLGFWNVREYVLFRDGHVCQHCHGRSKDPVLNVHHLESRRTGGDSPGNLITLCETCHKALHRSEITLKAKRGQSFRAESFMGIMRWEVLNRLKASHSELEVHNTYGYRTKHARIANGIDKSHCADAFCIAGNLGAQRLGEFFFQKQTRRNNRQIHKLSILKHGLRKRNQAPFEIKGFRLFDKVACKGEESFIFGRRSSGYFDVRKLDGTRISAGISYKKLRLLEKRRTYLTEIRKEEALPPLPEGRGLRA

SEQ ID NO: 19521 - protein, 469 aa, unidentified
VLDKVPPNNHFEANFTLETGDNQLMFVLVVDKNRKPLNPCHPARARKFLKEGKAVVLRRYPFTIMLKNVEEDCDNQQEYRLKLDPGSRTTGISILKDNTIIWAAELNHRGYSIKQSLESRRALRRGRRNRHTRYRKPRFNNRNRADGWLAPSLQHRVDTTLTWVNRLRRFCPITAISMELVNFDTQLIQNPEISGIEYQQGELAGYEVRQYLLTKWGRQCVYCGIEGVSLQVEHIHPKSKGGSNRVSNLTLSCVKCNQRKGNKPIEQFLSRKPDLLKKVLSLGKCPLKDAAAVNSTRWTLYRALSETGLPVETGTGGRTKFNRTRQELPKTHWLDAACVGQSTPDKLQVLIDKPLIITATGHGTRKVCRTDKYGFPVRYVPRSKFVHGFQTGDIVKAIVTKGKKIGTYMGRIAVRTTGSFNIATPNGLVQGISHKYCSRVQGKDGYQYTFSRKSCRTAVYVRGRIPPHT

SEQ ID NO: 19522 - protein, 451 aa, unidentified; identical to SEQ ID NO: 14945

SEQ ID NO: 19523 - protein, 449 aa, Allochromatium sp.
MAVFVLDKQKRPLMPCTEKRARLLLERGRAVVVRLAPFTIRLKDRIGGALQPLRLKLDPGSKTTGLALVRESEIVDAETGAVERLEHGLWFGELEHRGQQIREALTLRRHYRRTRRSRKTRYRAPRFLNRTRRDGWLPPSLQHRLDTTVNWVQRLRRLAPITGLSQELVRFDTQALQNPEISGVEYQQGELAGYEVREYLLEKWHRSCAYCGATHVPLEIEHIVPRSSGGSDRVSNLTLACQPCNQRKGSRSIEDFLQRQPARLHQIQAQAQAPLKDAAAVNATRWALLNALKATGLPVETGSGGRTKFNRTRLNLPKTHALDAACVGAVDHVRDWNRPILSIRATGRGAYSRTRTFKNGFPRGYLMRHKRVHGFQTGDWVHAEVPKGKKAGVHVGRVAVRQTGSFNIQAQAGTVQGISYRHCRVLQRADGYGYSFQPKPDTEEARRAA

SEQ ID NO: 19524 - protein, 408 aa, unidentified
MVYVQDINGKPMMPTTRHGKVRRLLKDKKAVVVNLCPFTIKLTYVTSDYKQEIVLGVDAGTKHVGLSATTKSKELYSSEVILRNDIVDLLSTRRELRRTRRNRLRHRKHRFNNRIKSRRPGWVAPSVRYKIDAHIRVIDNVCSILPISRIVIEVAQFDTQKINNPNISGKEYQEGDQLGFWNVREYVLARDGHKCQYCKGKSKDAILNVHHIESRKTGGDSPSNLITLCEICHKEYHKGNIDLKIKRGSSLRDAAVMGIMKWRLYEELKSKYDRVSMTFGYVTKYNRINHDIEKSHVSDAFVISKNFNAIRLGYYYKVRLVRRHNRQIHKQKITKGGIKRLNQSPFEVFGFRLFDRVMFENSYYFIFGRRKTGSFNIRDIDGKNQKNVTYKKLKLSRYKRFMIQKEMN

SEQ ID NO: 19525 - protein, 492 aa, unidentified
MTPVWEGRTFAYLPQSQKEEPAMSVFVVGLNGCRLMPVSERKARLILNDGKASVYRKVLFTIKLNYKTGSTTQPGYLGIDTGSQHIGVSVVREGGTVLHKEEIGLRDSMTKRKLLEAKASLRRGRRYRKTRYRHPKWRSKTKRVYCEVPDKKRRHWKKQKSTFTSGRPEGWLPPSLQSKTDHHIRWIKKLQGLLPEGYRLSIELGRFDPARMKDPEIHGNLYQKGPQYDYENVRAYVLDRDRYTCQVCRRKGGKLHVHHILYRSQGASDTPQYMATVCSSCHTTENHLPGGILYQWMQEQKKFTRGLREATFMNILRKRLMKTFPDAVFTYGNITKVDREKLKLPKSHGNDATAIALVRTGVTSVKDEEPVLYIQQVRRKKRSLHEETPRKGRKEPNRTAARNSKNTKAVTVTKRRGGKKVSVTACLFDRVELNGKKGWITGFTGKACRIVDTEGNYVAATDKYTQVNISSIRILHHTGNWVTGLKRNVGKR

SEQ ID NO: 19526 - protein, 413 aa, unidentified; identical to SEQ ID NO: 3695

SEQ ID NO: 19527 - protein, 390 aa, unidentified
LQFYRKEHSIMQYVYVLNKHGEPLMPCSPGKARILLKQQKACVVKRTPFTIKLLYGSAGYKQPITLGVDAGSKHVGLSASTEKRELYSEEFTPRNDVVELLSTRRQNRRSRRNRKTRYRAPRFNNRIHSKHKGWLAPSVEVKIQEHITVIKRICRILPITLVRVETAEFDTQRLKAMLSGKPLPVGTDYQLGEMYDEYNARQYVLRRDNYTCQRCGAHTTKKKAVKLHVHHLESRKVGGNAPSNLITLCVTCHNNLHKGKITLNGQKRGKTLRDAAFMGIMRNTLLTRLRNELNIPVQNTYGYITKLLREQNDIKKSHVNDARCISKHPLAEPCSVCYRTKAIRHHNRQIHKAKILKGGIRKANQAPYTVKGFRLWDKVLYNGQECFISG

SEQ ID NO: 19528 - protein, 247 aa, unidentified
PVGTDYQLGEMYDEYNVRQYVLKRDNYTCQCCGAHTTAKKLVKLHVHHLESRKTGGNAPSNLVTLCTTCHKNLHKGKVTLDGKERGKPLRDAAFMGIMRKTLMARLKEELPIPVQGTYGYITKMRREQNDIKKGHTNDARCISKHPLAEPCSVCYRTKAIRHHNRQTHKANFSKKGIRKRSQMPYLVEGYRLWDKVLYKEQECFVSGRRSSGSFTLKKLDGTSVSKGVTFKKLRLLEPATNYLIERM

SEQ ID NO: 19529 - protein, 423 aa, unidentified; identical to SEQ ID NO: 3538

SEQ ID NO: 19530 - protein, 326 aa, unidentified; identical to SEQ ID NO: 11710

SEQ ID NO: 19531 - protein, 430 aa, unidentified; identical to SEQ ID NO: 4817

SEQ ID NO: 19532 - protein, 457 aa, unidentified; identical to SEQ ID NO: 6126

SEQ ID NO: 19533 - protein, 479 aa, unidentified
MSTCVCVLSNSGERLMPTFRLGKVRRLLKDGKAKIVKHHPFTIQLLYDSKTNTQPIEICEDVGYNYIGISVKSQSHEYVSAQYDTLQDEKACHDSCRKLRRTRRNRLRYRKPRFDNRKRGEGWLAPSLEHKKQLNIRLIERYVSVIPITRATVEVGSFDTMLLQAIQKGESKPEGVDYQKGPRYNLATLREAVFYRDNYTCQVCGRKIADGAILHMHHMFYWKGRHGYQLDELVTACEKCHTPANHQKGGNSLSELITVCEKCHTPANHQKGGKLFGFGEDKEFANLSGAAFMNAVRWQIVNALYATYGKEFVTITYGAMTKEKRIALQLEKTHSNDAYAMGNCHPAHRCVFRHYQKRRRNNRVLEKFYDATYIDARTGNKAKGKELFNGRINRNHKKDSENFHKYRSKKVSKGRRSIRRQRYAIQPYDTVRLEGKTYITSGCHNKGTRLLIPINGKSKSVAISKVQVVCHAGAWIQII

SEQ ID NO: 19534 - protein, 414 aa, unidentified
MPCSPAKARLLLKEKKAIVVRRTPFTIQLTIATGEAKQPVSLGIDAGYKHVGLSASTGKAELYASEVELRQDITDLLSARRALRQSRRNRKTRYRAPRFDNRIRTKRKGWLAPSVENRINAHLSRIEAVLRLLPVTKITVETASFDLQLLKNPDIAGKEYQEGEQLGFGNIREYVLCRDGHVCQHCYGGSKDPVLNVHHLESRRTGGDSPDNLLTLCETCHKALHRGEITLKTKRGQSFRAETFMGIMRWEVLNRLKASHSELKVHNTYGYLTKHARIENGIAKSHGADAFCIAGNLGAERLGEFFFQKQTRRNNRQIHKLSILKGALRKRNQAPFEVKGFRLFDKVACQGEEGFIFGRRSSGFFDVRKLDGTRISAGISYKKLHLLEKRQTYLIEIRKEEAFPPLPEGRGLRA

SEQ ID NO: 19535 - protein, 442 aa, unidentified; identical to SEQ ID NO: 7482

SEQ ID NO: 19536 - protein, 511 aa, unidentified
LAVTGLQQKRRTMRYVYVLDMNGEPLMPTCRYSKVRRMLKSGQAKAVDTLPFTIQLLRPTQTRILQPVIAGQDPGRTNIGMAAVRSDGTELYRAHIETRNKEIVSLMNDRRSFRQASRRGERLARKRLAKKLHTTAKHLNGRILPGCKEPLAVKDIINTESRFNNRLRSEGWLTPTATQLLRTHLEAFRKLSGILPVTEVVLEVNRFAFMQLDNPDMEKRDIDFCRGPLYGTGGVKAAVSLQQDGLCLLCRERGIEHYHHIVPRSRRGSNTISNIAGLCKKCHERVHKDRAAAERLQSKKDGLSKKYGGTSVLNQIILSLAEELGIRYPGHAHVTNGWNTKEFRKKHELEKDHDIDAYCIAASILEDAQPIMQTEPYEMKQFRRHSRALINHQTERTYRYDGKIIAKNRKKRMDQKTDSLEDWVADMTKQYGQEAASRMLSKVTVQKSTRHYNTKGRMMPGAVFIYQKKRFVMTGQLTGGAYYRAYGQDKKNFPAKAVQVVRKNKGLVYVA

SEQ ID NO: 19537 - protein, 420 aa, unidentified; identical to SEQ ID NO: 19092

SEQ ID NO: 19538 - protein, 420 aa, unidentified; identical to SEQ ID NO: 2681

SEQ ID NO: 19539 - protein, 396 aa, unidentified
LLKQKKACVVKRTPFTIKLLYGSTGYKQPITLGVDAGSKHIGISAATEKYELYCEEATPRNDVVDLLSARRAFRRSRRNRKIRYRAPRFNNRVHSKHKGWLAPSVEVKIQEHITLIKRVCRILPVTFVRVETAEFDTQRLKAMLEGKPLPVGTDYQLGEMYDEYNVRQYVLKRDNYTCQCCGAHPTKTKAVKLHVHHIETRRTGGNAPNNLITLCTACHKALHAGKVTLDGKKRGRSLKDAAFMGVMRKTLMERLLKELKIPVQGTYGYITKYLREKHSIPKSHTNDARCISKNPLAIPCDTCYYTKAIRHHNRQLHKATILKGGIRKANQAPYTVKGYRLWDKVSYNGSECFITGRRTSGYFALKKLDGTVVSNSASYKKMRLLEVATNYITERR

SEQ ID NO: 19540 - protein, 464 aa, unidentified; identical to SEQ ID NO: 3455

SEQ ID NO: 19541 - protein, 424 aa, unidentified; identical to SEQ ID NO: 3232

SEQ ID NO: 19542 - protein, 489 aa, unidentified
MTMVYVQNKDGKPLMPTTRYCYVRLLLKEKKARVVCTTPFTIQLNYDTPDVTQDLILGIDPGRTNIGVAVVKEDGSCVFSAHLETRNKEVPLLMKKRAAFRRQHRTQDRRRKRQRRAIAAGTTVESNTIERLLPGYEKPVVCHYIRNKEARFNNRSRPVGWLTPTANHLLQTHINLIAKIAKFLPITKVVVELNRFAFMAMDNPNIHRWEYQQGPLYGLGSVEDAVYAQQDGHCLFCKKPIDHYHHVVPRHKGGSETLANRCGLCERHHALVHKDKAWAEKLVTRKGGMNKKYHALSVLNQIIPHLMEYLGSETPYDVYATDGKSTKGFRIAKNVPKEHYTDAYCIACSILDTDIEVSAPTSPFGLKQFRRHDRQTCIRQMVDRKYLLDGKVIATNRHKAIEQKSNSLQELREAYGDAAVSQLTVKPHPPQYKDMTRIMPGAVMDFNGTIGVMQSSIVGRFYKSTKGYKATPRRCVLLAQNAGMVFLPA

SEQ ID NO: 19543 - protein, 425 aa, unidentified; identical to SEQ ID NO: 13021

SEQ ID NO: 19544 - protein, 490 aa, unidentified
MYVVYVLNRQGKPLMPTKRSGHVRRMLKTGKAKAVSTKPFVIQLQYESTDFVQPLYGGTDPGRTNIGEAVLNSKGEVVYAAHLVTRNKEIPKLMADRATHRRASRRGERLRRKRRAKANGTMTCFPKGRKLHGYKDGVLKLKDIINTESRFNNRKRPVGWLTPTARQCIQTHLNMVRNICKILPVTNWTLEYNRFAFMQLEDSSVRGWDFQNGRLKGYASKEDYIYALQGGVCICCGASIEHYHHIKPRHKGGSNTPENLVGLCSVCHAEIHTGKRNLDKIGKYKKYAGTSIVNIAIPFIWDGIVKMFGDKAHICEGQETAELRRANSIPKEHFADAVCIAGIGSGITPQYDNEQPFELRQFRCHNRSHINAQMERTYMDGKTIVAKNRKPRFEQKGDALSDLQSKITKEHGELAARRAVSKLVAKKSYRRYNASERIKPSAVFMFNNKKYLLRGQLTNGKYYRAFGEGTKNFPSRNCEVVSSGYSLTYA

SEQ ID NO: 19545 - protein, 470 aa, unidentified; identical to SEQ ID NO: 4092

SEQ ID NO: 19546 - protein, 431 aa, unidentified
MPNKVYVINKHGRPLMPCSPAKARHLLDEGKAKVKKRTPFTIQLVYGSSGYTQEVILGVDAGSKTIGMSASTTKEELLSAEVKPRNDVVDLLSTRREFRRARRNRKTRYRKPRFDNRVRSKHKGWLAPSVEVKIQEHITSIKRVCRILPVSKVVIETAEFDLQMLKAIADGKPVPQGEDYQQGEMYGHYNVRQYVLWRDGYTCQCCGAHATKKKEVRLHVHHLESRKVGGDAPDNQVTLCESCHEKLHKGLIAEKDFKKRKRKSTRDATFMGIMRKTLMQRLCSELPIPVVKTRGYITKATREKLLVLPKSHTNDALAIAQGKRGFNVGYLPEIAQIDKIYTIRPVRHHNRQLHKATILKGGIRKSNQTEKYVFGYRLFDKVQFNGQDCFIWGRRTTGIFTIKTINGKMIKDGISFKKLKPVEKSTGYLIA

SEQ ID NO: 19547 - protein, 424 aa, unidentified; identical to SEQ ID NO: 13009

SEQ ID NO: 19548 - protein, 492 aa, unidentified
MTPVWEGRTFAYLPQSQKEEPAMSVFVVGLNGCRLMPVSERKARLLLDDGKASVYRKVPFTIKLNYKTGSTTQPGYLGIDTGSQHIGVSVVREGGTVLHKEEIGLRDSMTKRKLLEAKASLRRGRRCRKTRYRHPKWRPKTKRVYCEVPDKKGRHWQKQKNTFISGRPEEWLPPSLQSKTDHHIRWIKKLQGLLPEWYRLSIELGRFDPARMKDPEIHGNLYQKGPQYDYENVRAYVLDRDRYTCQVCRRKGRKLHVHHILYRSQGASDTPQYMATVCSSCHTTENHLPGGILYQWMQEQKKFTRGLRDATFMNILRKRLMKTFPDAVFTYGNITKVDREKLKLPKSHGNDATAIALVRTGVTSVQDEEPVLYIQQVRRKKRSLHEETPRKGRKEPNRTAARNSKNTKAVTVTKRRDGKKVSVTACLFDRVELNGKKGWITGFTGKACRIVDTEGNYVAATDKYTQVNISSIRILHHTGNWVTGLKWNVGKR

SEQ ID NO: 19549 - protein, 535 aa, unidentified
VLRPRYQYPTRWYPSREQGSGNGCLSGEENTDLEQEVSGTLSKGDHSHPGEQDFCVPAITIQGGPAMSVFVVGLNGCRLMPTSERKARLLLKHGKASVYRKVPFTIKLNYKTGSTTQSGYLGIDTGSQHIGVSVVREDGTVLHKEEIGLRDSMSKRKLMQSRASSRRGRRHRKTRYRHPKWRPKAKRVYCEIPDRKGRHWKKKEITFASKRAKGWLPPSLQSKTDHHIRWIKKLQDLLPEGYRLSIELGRFDPARLKDPEIHGELYQKGPQYDYENVRAYVLNRDRYTCQVCGKKGGKLHVHHILYRSHGATDDPQYMATVCSDCHNTENHQQGGILYQWMQKQKKFTRGLRDATFMNILQKRLIEAFPGATFTYENITKADRERLRLPKSHGNDATAIAIVKTGIMTVKDKEPVIYIQQVRRKKRSLHEETPRKGRKEPNRTASRYDKNTKAVTVTKRKNKKISITGCLFDRVELNGKKGWISGFTDKSCYVKDENDQYIRTSPKYKQVSLSKLKILHHCGNWVIGARRSLGKG

SEQ ID NO: 19550 - protein, 370 aa, unidentified
GYKHVGLSASTEKAELYASEIELRQDITDLLSARLALRRARRSRKTRYRAPRFDNRVRSKRKGWLAPSVENRIAAHLSRIEAVLRILPVTKITVETASFDMQLLKNPDISGKGYQQGEQLGFWNVREYVLFRDGHVCRHCGGRSKDPVLNVHHLESRRTGGDSPGNLITLCETCHKALHRGEIKLSIKRGASFRAEAFMGIMRWKVLDRLKAAHPELEVRNTYGYLTKHARIEHGIAKSHCADAFCIAGNLKADRLGSFYYQKQTRRHNRQIHKLSILKGGVRKRNQAPYEVKGFRLFDKVACKGETAFIFGRRSTGSFDVRKLDGTRISAGISFKKLRLHERRRTYLTELRKEAALPPLPEGRGLRADF

SEQ ID NO: 19551 - protein, 426 aa, Methanosarcina sp.
MLVFVINQNKKPLMPCKPSKARKLLQAGKAKVVRNTPFTIKLLFRSSGYTQPVTAGMDTGSKVVGCAAIANGKVLYQSEIYLRENVSKKMEQRKMYRRSRRSRKTRYRPARFDNRGNSKKEGRLAPSIRSKLEAHFREKRFVESLLPVTEWKVELASFDIHKITNPEVSGIGYQEGDLKGFYNIKAYVLDRDGYTCQHCRGKSKDSRLHCHHIVFRSQKGTDAPENLITLCETCHKALHNGEFKLSGKKSKTKHATEVGIIKSQIRKSGWNFAETFGYETKYRREQVLKLLKTHYFDAVAICCRDDQKVEVEESVFLKRNVSKGDYQQRTGKRSEKKIHTGKLFNLRKFDLVKTSKGIGFVKGKRSSGFFAISDMFGNKISDSVNVKKICERLRARTSTLIQQSRTGKFTHSSPELKTQGFPAEGL

SEQ ID NO: 19552 - protein, 493 aa, unidentified; identical to SEQ ID NO: 3154

SEQ ID NO: 19553 - protein, 456 aa, unidentified; identical to SEQ ID NO: 11534

SEQ ID NO: 19554 - protein, 431 aa, unidentified
MPNKVYVINKHGRPLMPCSPAKARHLLDEGKAKIKKRTPFTIQLVYGSSGYTQEVILGVDAGSKTIGMSVSTTKEELLSAEVKPRNDVVDLLSTRREFRRARRNRKTRYRKPRFDNRVRSKHKEWLAPSVEVKIQEHITAIRRVCGILPVSKVVVETAEFDLQLLKAIADGKPVPQGEDYQKGEMYGHYNVRQYVLWRDNYTCQCCGAHATKKKEVRLHVHHLESRKVGGDAPDNQVTLCESCHEKLHKGLIAEKDFKKRKRRSTRDATFMGIMRKTLMQRLCSELPIPVIETRGYITKATREKLLVLPKSHTNDALAIAQGKQGFNVGYLPGIVQINKIYTIRPVRHHNRQLHKATILKGGIRKSNQVGKYVFGYCLFDKVQFNGQDCFIWGRRTTGIFTIKTINGKMIKDGISFKKLKPVEKSTSYLIA

SEQ ID NO: 19555 - protein, 427 aa, Anabaena sp.
MSKVFVLDTNFTPLNPIHSAQARQLLRNKKAAIYRQFPFTIILKKSRPESPVSSLKLKIDPGAKFTGMVLVNDLTGEVVFAAELKHRGFAIRDALTSRRQLRRSRRARKTRYRQPRFLNRTRPEGWLAPSLQSRVDNIKTWVERLRKLSPIQAISQELVRFDMQLMANPDIQGKEYQQGTLAGYETREYLLEKWSRQCAYCGAKDVPFQIEHIHPRAKGGSNSITNLTLSCEKCNTKKGTKDIKDFLKKDPSKLEKILKQAKRPLANAAAVNTTRTALLEVLKATGLPVETGSGGLTKFNRSEQNLEKTHWIDAACVGKSTPILNIKGVKPLLITANGHGSRQSCRTDKYGFPSRHVPREKIHFGFQTGDIAKAVVTTGKKIGTYVGKVAIRLTGSFNISTKNGLIQGISHKFCKRIHAKDGYSYAV

SEQ ID NO: 19556 - protein, 458 aa, unidentified; identical to SEQ ID NO: 4474

SEQ ID NO: 19557 - protein, 499 aa, unidentified
MRYVYVLDVDGKPLMPTCRFSKVRRMLKSDQAKAVDTLPFTIQLTYRTKTRILQPVTLGQDPGRTNIGVAAVRSDGKELGRFHCITRNKEIPKLMADRMAVRRASRRGERLVRKRLARKLHTTAKHLEGRMLPGCDKPLPVKDIINTESRFNNRLRPEGWLTPTATQLLRTHINLFVRLAKILPVTDVAIELNKFAFMQLDNPEMKKREIDFCHGPLYGTGGLEATVKEQQNGKCLLCGKEPISHYHHIVPRSRRGSNTIANIAGLCPKCHELVHKDADTAERLTEMKTGLTKKYGGTSVLNQIIPKLVETLADLFPGHFHVTNGWNTKEFREKHHLEKDHDVDAYCIACSHLKPEETLVETEPFEILQFRKHNRAIIHHQTERTNKLDGVTVAKNRKKRMEQKTDSLEDWYVDMAKEHGKTQADAMRSRLTVIKSTRYYNTPGRMMPGTVFLYEGKRYVMTGQITNGKYYRAYGQEKRNFPAVKVRILTKNTGLVFVA

SEQ ID NO: 19558 - protein, 449 aa, Allochromatium sp.
MAVFVLDKQKRPLMPCTEKRARLLLERGRAVVVRLAPFTIRLKDRIGGAVQPLRLKLDPGSRTTGLALVRESETIDPDTGAVERVAHVRWLGELTHRGHQIREALTARAAFRRRRRTANLRHRAPRFDNRTRPAGWLAPSLRHQVETTANWVARLRRLAPLSAIGLELVRFDMQAMQNPEISGVEYQQGTLAGYEVREYLLENWHRTCAYCGATNVPLEIEHIVPRSNGGSNRVSNLTLACSPCNRKKGAQPVEVFLKGKPEVLRRIQAQAKAPLKDSAAVNATRWALFGALQATGLPVETGSGGRTKFNRTRLDIPKTHALDAACVGQVDTLSGWQCPTLAIRATGRGRYQRTRPDRFGFPRGYLMRHKRVHGVQTGDRVIARVPTGKKAGVHVGRVAVRARGVFNIQTAAGVVDSLSHRHCRVLQRADGYGYAFNPKTLTEEARRAA

SEQ ID NO: 19559 - protein, 426 aa, Parasutterella sp.; identical to SEQ ID NO: 3045

SEQ ID NO: 19560 - protein, 465 aa, unidentified
MSTCVCVLSNNGERLMPTIRLGRVRHLLKDGKAKIIKHHPFTIQLLYDSKTNTQPIEICEDVGYNYIGISVKSQSHEYVSAQYDTLQDEKACHDSCRKLRRTRRNRLRYRKPRFDNRKRGEGWLAPSLKHKKELNVNVVKMYCTVMPITHATVEVGSFDTMLVKAIQEGKVIPEGADYQKGPRYNLATLREAVFYRDNYVCKICGRKATEGAILHMHHMFYWNGRHGNSLNELLTVCEKCHTPANHQKSGKLYGFGEKIKFADLSGAAFMNTVRWQIVNELYVAFGKPFVTITYGAMTKEKRIALQLEKSHNNDAYAMGEFHPNLRCMFEHYEKARRNNRILEKFYDSRYIDIRTGEIATGKELFNGRINRNHKKDSENLHKYRGKRTYAGHRALLRKKVNLNPGDLVSLNGENLIVHSTHTKKNGAVNVEFETPAKSGQKSASLKKLKIVKAANSIHPAWKKIS

SEQ ID NO: 19561 - protein, 424 aa, unidentified; identical to SEQ ID NO: 4955

SEQ ID NO: 19562 - protein, 452 aa, unidentified
MQKLSVEFKNTPGNASQVPCSVNEILTREDTLSVSSKVLADNNSNENLHSGMSGQNMRVFVLNMRGNPLIPTTPGKARKLLEQNRAKVVQRTPFTIQLLYATGETKQDITFGVDPGYSYIGYSVVSDTTELIAGEVELRNDITKLLDQRASYRRTRRGRLWHREPRFNNRGRDNGWFAPSIQHKLNSHINFIDRIKSILPITKTVVEIASFDQQKIQNPEISGVEYQQGELLGYEIREYLLEKWKRTCAYCGKTDIPLEIEHIIPKSRGGSNRVSNLTIACHACNQAKDNMTAGEFGHPTIQTKAKKPLKSAAFMNIVKKKLANILDCEVTYGYITKHDRFKLGLTKSHVNDAFVIASGNTQHRCETDTVTLTRRNNRSIQTNRKGFKPSIRRHRYNLQPNDLVEHDGLLYWVKGVFNYGKWVRLVDSAGIIINSNIKKVELLKYGKGLQFT

SEQ ID NO: 19563 - protein, 459 aa, unidentified
MNTCVCVLSNSGERLMPTFRLGKVRRLLKDGKAKIVKHHPFTIQLLYDSKTNTQPIEICEDVGYNYIGISVKSESHEYVSAQYDTLQDEKEHHDDCRMHRRTRRNRLRYRKPRFDNRKRGEGWLAPSLKHKKELNVNIVKMYCAVIPITHATVEVGSFDTMLVKAIQEGKAVPEGANYQKGPRYNLATLREAVFYRDNYACKVCGRKATEGAILHMHHMFYWKGRHGNSLGELLTVCEKCHTPANHQKSGKLYGFGEKIKFADLSGAAFMNAVRWQIVNELYTAFGKPFVTITYGAMTKEKRIALQLEKSHNNDAYAMGEFHPNLRCSFEHYEKARRNNRILEKFYDSRYIDIRTGETATGKELFNGRINRNHKKDSENLHKYRGKKTYAGHRALLRKKVSLNPGDLVSLNGENLIVHGTHTKKNGAVYVEFETPAKSGQKLKIVKAADSIHPAWKKVS

SEQ ID NO: 19564 - protein, 458 aa, Lactobacillus sp.; identical to SEQ ID NO: 5505

SEQ ID NO: 19565 - protein, 415 aa, unidentified
VLEITNYVFVLDANGKQLAPTKEQKAWFLIRKKRATLVSKYPMVIQLKKEIPDEQIYKDEICCGIDDGGLHVGISLVQKCKTKNKVVFKGTMEQRKDVKHLMEVRKGYRRYHRFYKRYRQARFNNRKSSKRKERIAPSILQKRQATIRVINQLNKWINITNYWLEDVAIDIRALTDGYKAYRWQYQQSNRLDENIRKAVILRDGCKCMECGKSNCKLEVHHIKPRRLNGSNTLGNLISLCKKCHQKTEEQEEVYMNRYFSMLNSSDNKNLNYAQHVMIGKKWLIEQLSKLGTLTLATGGDTANKRIDWNIEKSHSNDAICIAGLQPDTCNVKEWTIKPMRRQSKAKTDNVLGINHRDLVEYTFRNGETHRGYVTALYPGQNAINFQSSTKHCKKVNAKKCKLIWKYSKIYWLANV

SEQ ID NO: 19566 - protein, 424 aa, unidentified; identical to SEQ ID NO: 4955

SEQ ID NO: 19567 - protein, 420 aa, unidentified; identical to SEQ ID NO: 9245

SEQ ID NO: 19568 - protein, 417 aa, unidentified
MPCSPAKARLLLKERKAIVKRRTPFTIQLTIATGEAKQPVALGVDSGYKHIGLSATTEKAELYASEVELRQDITDLLSARLALRRSRRSRKTRYRAPRFDNRVANKREGRLAPSVENRIAAHMSRVEAVMQVLPVTAITVETAAFDTQLLKNPDITGAAYQQGEQLGFWNVREYVLFRDGHVCQHCRGKSKDPILNVHHIESRRTGGDAPNNLITLCETCHKAFHRGEIKLKVRRGKSFKAETFMGIMRRTLFERLKKAHPELNVRNTYGYLTKHKRISYGIAKSHCADAYCIADNLGAKRLEGFFFQKQTRKHNRQIHKLSILKGGLRKKNQAPYEVKGFRLFDKVICKGEEAFIFGRRTSGSFDVRRLDGTRISAGISYKKLRRLESRTTYLTEFRKEAALPPLHKCRGFRAEFL

SEQ ID NO: 19569 - protein, 408 aa, unidentified
MVYVQDINGKPMMPTTRHGKVRRLLKSNKEIVVNLCPFTIKLTYVTSDYKQEIVLGVDAGTKHVGLSATTKSKELYSSEVILRNDIVDLLSTRRESRKVRRNRLRYRKPRFDNRVKSKRPGWIAPSVKYKVDAHIRVIGNVCSILPISRIVIEVAQFDTQKINNPNISGKEYQEGDQLGFWNVREYVLARDGHKCQYCKGKSKDSILNVHHIESRKTGGDSPSNLITLCETCHKEYHKGNIDLKIRRGKSLRDAAVMGIMKWRLYEELRSKYGIVSMTFGYVTKYNRINHGIEKSHVSDAFVISKNFNAIRLGYYYKVRLVRRHNRQIHKQKIQKGGIKRLNQSPFEVFGFRLFDRVMFENSYYFIFGRRKTGSFNIRDIDGKNQKNVTYKKFKLSRCKRFMIQKEMN

SEQ ID NO: 19570 - protein, 419 aa, unidentified; identical to SEQ ID NO: 3670

SEQ ID NO: 19571 - protein, 420 aa, unidentified
MQYVYVLNKHGEPLMPCSPRKARLLLKQKKACVLKRTPFTVKLLYGSAGYKQPVTLGVDAGSKHIGISATTEKHELYREEATPRNDVVDLLSARRAFRRSRRNRKTRYRAPRFNNRVHSKHKGWLAPSVEVKIQEHITLIKHVCRILPVTLVRVETAEFDTQRLKAMLEGKPLPIGTDYQLGEMYDEYNVRQYVLKRDNYTCQCCGAHSTKTKGVKLHVHHIETRRTGGNAPNNLITLCKACHKALHAEKVTLDGKKRGKPLKDAAFMGIMRKTLMERLRKELKIPVQGTYGYITKYLREKNGIPKSHTNDARCISKNPLAIPCDTCYYTKAVRHHNRQLHKATILKGGIRKANQAPYIVKGYRLWDKVAYNGTECFITGRRTSGYFALKKLDGTVVSNSISYKKMRLLEAATNYIIERK

SEQ ID NO: 19572 - protein, 431 aa, unidentified
MPNKVYVLNKHGRPLMPCSPATARHLLDDGKAKVKKRTPFTIQLLFGSTGYTQEIILGVDAGSKTIGLSASTETEELFSAEVKPRNDVVDLLSTRRESRRARRNRKTRYRKPRFDNRVRSKHKGWLAPSVEAKIQEHITAIKRACRILPVSKVVVETAEFDPQLIKAVEEGKPIPQGEDYQKGEMYGHYNVRQYVLWRDGYVCQCCGAHATHKKEVRLHVHHLESRKTGGDAPSNLITLCDNCHEKLHKGIITAVDLKKRKRRSSRDATFMGIMRKTLLQRLCAELTIPVAETRGYITKATREKLLVLPKSHTNDALAIAQGPQGFRTGYLPSIRQATRIYTIRPVRHHNRQLHKATILKGGVRKANQAEKYVYGLRLYDKVLYNGIECFVWGRRSSGSFLLRRLGGAKVKDGVSYKHLKLLERSQNYLIA

SEQ ID NO: 19573 - protein, 367 aa, unidentified
YKHVGLSASTEKAELYASEIELRQDITDLLSARRALRQSRRNRKTRYRAPRFDNRIRTKRKGWLAPSVENRINSHLSRIEAVLRLLPVTKITVETASFDLQLLKNPNISGKEYQEGEQLGFWNIREYVLCRDGHVCQHCYGRSKDPVLNVHHLESRRTGGNSPGNLITLCETCHKALHRGELTLKAKRGQSFRAEAFMGIMRWEVLNRLKASHPELEVNNTYGYRTKHARISNGIAKSHCADAFCVAGNLGAKRLGEFFFQKQTRRNNRQIHKLSILKHGLRKRNQAPFEIKGFRLFDKVVCKGEEGFIFGRRSSGYFDVRKLDGTRISAGISYKTLHLLEKRQTYLTEIRKEEALPPLPEGRDLRA

SEQ ID NO: 19574 - protein, 520 aa, Nocardiopsis sp.; identical to SEQ ID NO: 13514

SEQ ID NO: 19575 - protein, 419 aa, Paenibacillus sp.; identical to SEQ ID NO: 3664

SEQ ID NO: 19576 - protein, 515 aa, unidentified; identical to SEQ ID NO: 7819

SEQ ID NO: 19577 - protein, 447 aa, unidentified
VPAYRFKHITKKEVPYMVYVLDIDGQPLMPTSRHGKVRRLLNSHLAKVVKRCPFTIQLLYQSTKETQPVSLGVDAGSRHIGLSATTEREVVYQEELVPRNDIVKLLSARRALRRSRRNRKTRYRKVRFNNRVHSKHKGWLAPSVEVKIQEHITAIKRICQILPISDIHVETAEFDLQRLKAMEAGRLLPAGTDYQLGEQYDFYNTRQYVLHRDEYTCQCCGTHDNNVKLHVHHIESRQTGGEAPNNLITLCEHCHKSIHVGKMMLPKGKKRGKSYRDAAFMGIMRNTLLERLRKEVNVPVTMTYGYITKYWREKAGLEKSHINDAICISKHPYARPLETYYLTKAVRHHNRQIHKTKFSKGGIRKRNQAPYLVKGFRLFDKVLYQGESYFIFGRRITGYFDIRTLDGTKVNKGSTSYKKLRIQDTAEAYLTEVRAIPHMNEFTCVLA

SEQ ID NO: 19578 - protein, 349 aa, unidentified
RYRKPRFDNRKRSEGWLAPSLEHKKQLNIRLIERYVSVIPITRATVEVGSFDTMLLQAIQKGESKPEGVDYQKGPRYNLATLREAVFYRDNYTCQVCGRKIADGAILHMHHMFYWKGRHGNSLDELLTVCEKCHTPANHQKSGKLYGFGEDVKFANLSGAAFMNTVRWQIVNELYAAFGKPFVTFTYGAMTKEKRIALHLEKSHNNDAYAMGDYHPAHRCEFGHYQKRCRNNRVLEKFYDATYIDTRTGNKAKGKELFNGRISRNHKKDSEDLHKYRSKKVSKGRCSIRRQRYAIQPYDTVRLESKTYITSWCHNKGTRLLIPANGKSKSVAISKVQVVCHAGAWIQII

SEQ ID NO: 19579 - protein, 507 aa, unidentified
MPEYIYVLGMDGKPQMPTKRRRHVNKLLNTGKARIAEHVPFTIQLLYENNPTVQPVMMAEDPGRTNIGTAVVGLKGQLYLSAVVETRNKEIRKLMDKRRACRRASRNGERKARQRRAKRFGTMLKAGMLMRKLPQYGEDGFITCHVIRNTEARFCNRKRPKDWVTPTVEQLIRTHINLVHKMQKFLPITDVAIEVNRFAFMLLDDPTVAGVDFQKGPLKGYSNVNDAVFDQQDGKCLLCGQPIEHYHHIIPKSKGGSNTLGNIAGLCCNCHDTVHKNEDVQKALKDKKSGLMKKYAALSALNQAIPFIYKRLVEEFGKAHVFTCTGRETALVRKSLGFTKTKQNQLHEVDAYCIALLALGCTDAENPSFEHVYQMKQFRRQNRANINNQRERSYYYEGRLVAKNRKDRIEQKDDSLETWYQKMVQQYGEKEAERRRSVLQVKRSTRHYNTPGRVTPGTVFYCNGERHVLNGQITNGQYFKAVGDAKTNYPAKKCRIVKQNEGLVFLG

SEQ ID NO: 19580 - protein, 437 aa, unidentified; identical to SEQ ID NO: 4003

SEQ ID NO: 19581 - protein, 406 aa, unidentified
VTTILKTCFAASNLAKIVVLMDAWDIIVVLNKRGKPLMPCSPAKARLLLKEKKAIVKRRTPFTIQLTIATGESKQPVSLGVDAGYKHVGLSASTEKAELYASEVELRQDITDLLSARRALRQSRRNRKTRYRAPRFDNRIRTKRKGWLAPSVENRINAHLSRIEAVLRLLPVTKITVETASFDMQLLKNPDIAGKEYQEGEQLGFWNVREYVLFRDGHVCQHCHGRSKDPVLNVHHLESRRTGGDSPGNLITLCETCHKALHRGEIKLKAKRGRSFRAETFMGIMRWGVLNRLKASHPKLEVHNTYGYRTKHARIANGIAKSHCADAFCIAGNFGAKRLGEFFFQKQTRRNNRQIHKLSILKGDIRKRNQAPFEVNGFRLFDKVACKGEEGFIFGRRSSGFFDVRK

SEQ ID NO: 19582 - protein, 326 aa, unidentified
MVYVQDINGKPMMPTTRHGKVRRLLKDKKAVVVNLCPFTIRLTYVTSDYKQEIVLGVDAGTKHVGLSATTKSKELYSSEVILRSDIVDLLSTRRELRKTRRNRLRYRKPRFDNRVKSKRSGWIAPSVKYKIDAHIRIVDNVCSILPISRIVIEVAQFDTQKIKNPNISGKEYQEGDQLGFWNVREYVLARDGHKCQYCKGKSKDKILNVHHIESRKTGGDSPYNLITLCETCHKEYHKGNIDLKIRRGKSLRDAAVMGIMKWRLYEELKSKYDNISMTFGYVTKYNRIKHGIEKSHVSDAFVISKNFNAIRLGYYYKVRLVRRHNR

SEQ ID NO: 19583 - protein, 512 aa, unidentified
MSTVYVLNKDGKPLMPTTRGWHVRYLLKEKKARVVTSKPFTIQLLYETDDVVQPLYLGIDPGRTNIGVAVVKTDGTAVFTAHLETRNKEIPKLMQGRKKARRARRTNGRRCRRQRRAKANGTISKKCVKQTTAQNGSVSKRAKKIGVIKRHLPGCEKKVLCIGIKNKEAKFSNRTRPEGWLTPTANQLLQTHINLVKKIQKFLPISDVVLEVNKFAFMQLDNPNIQKWQYQQGPLYQKASLEEAVSEMQEHHCLFCKKPIAHYHHVVPQSENGSNTIRNIVGLCTKHHDLVHKDTTWQKKLAKKKTGFNKKYGALSVLNQIIPALTKELSFLFPKHFFATNGKSTYDYRAAHGVSKDHWLDAYCIACSVLADDVCDNNISSHVPYELKQFRRHDRRALHKENMSRVYTLNGKSVATNRHKATEQTTDSLEEFRQRKPNDVCKLKVKEHHPEYRNPERNFPGCVFLVGKHTHVMQGTSGSHNGKADGYYDTNGNSYPSGKCKFVAKNKGIVFA

SEQ ID NO: 19584 - protein, 421 aa, unidentified; identical to SEQ ID NO: 4235

SEQ ID NO: 19585 - protein, 409 aa, unidentified
MSVYVKNHDGATLMPCTEAKARKLLEAKKAKIVDYRPFTIQLSWQCEGHIQDVTCGIDKGSSVTGLACVGNGKVLLAAEIHHRKDVTDKMQDRRDRRKSRRARRWYRPCRFLNRGSSKRSGRLPPSIKTNAEEVIRVVGSIPLPISSLVIEDVQVDIARLNNPKLKGSQYQDPSRLDENLRMACLMRDGYCCQYCHKRGVRLEAHHIQFVSQGGKDNLCNLLTLCEGCHHRLHQGKIRLNVTGVSSHLDQIAQRSMQGKSHVYARLGTFAPLITVFGYQTCAYRKYRNLPKTHIIDALCIATLGTGEVVAVPEKNVYHIRFRPRQTRKRYHSQSQKGKGRVKYQVNEQLQGFRKGDLVLVKSKYVKLIHSIYSNGYLAFPRVKGEPNQALPRDCRILEQEGTILWEKVG

SEQ ID NO: 19586 - protein, 449 aa, unidentified
PTIRLGRVRHLLKDGKAKIIKHHPFTIQLLYDSETNIQPIEICEDVGYNYIGISVKSQSHEYVSAQYDTLQDEKSCHDACRRMRRTRRNRLRYRQKRFDNRKRDKGWLAPSLKHKKELNVNVIKMYCEVVPITHATVEVGSFDTMLVKAIEEGKATPEGADYQKGPRYNLATLREAVFYRDNYTCQVCGREASEGAILHVHHMFYWKGRHGNSLSELITVCEKCHTPANHQKGGKLYGFGEDIKFANLSGAAFMNTVRWQIVNVLNAAFGKPFVTFTYGAMTKEKRIALHLEKSHNNDAYAMGSFHPVNRCAFEHYEKVKRNNRILEKFYDSQYIDIRTGEIATGKELFNGRISRSHKKDSENLHKYRGKRICKGHRALRRKKVALNPGDLVSLNGEILVVHGTHTKKNGSVNVEFKTPSRGGKKSASLKKLKIVKTSNLMHSAWTKVA

SEQ ID NO: 19587 - protein, 470 aa, unidentified
MSVFVVGLNGCRLMPVSERKARLLLKGGKASVYRKVPFTIKLNYKTGSTVQPGYLGIDTGSQHIGVSVVRQDGTVLHKEEIGLRDSMSKRKLLESRASLRRGRRYRKTRYRHPKWKPKTKRIYSEKADRKGRHWKKQKNMFTSKRQAGWLPPSLQSKTDHHIQWIRKLLHLLPEGYRLSIELGRFDPARMKDPGIHGELYQKGPQYDYENVRAYVLARDGYTCRVCKKKGGKLHVHHILYRSRGASDDPKYMAAVCSNCHTTENHLPGGILYQWMQEQKKFTRGLRDATFMNILKKRLRRAFPDAVFTYGNITKADREKLGLPKSHGNDATAIALVKTGVTSVRDEEPVIHIQQVRRKKRSLHEETPRKGRKEPNRTASRNDKNTRSVTVSKGSGKKKVSMTACLFDRVELDEKKGWITGFTGTSCYVKDKEDNYICTSPKYKQVSISKLRILHHCGNWVIGAEKPLGKG

SEQ ID NO: 19588 - protein, 456 aa, unidentified
MSTCVCVLSNNGERLMPTIRLGKVRHLLKDGKAKIIKHHPFTIQLLYDSKTNTQPIEICEDVGYNYIGISVKSESHEYVSAQYDTLQDEKEHHDDCRKYRRTRRNRLRYRKPRFDNRKRSEGWLAPSLEHKKQLNIRLIERYVSVIPITRATVEVGSFDTMLLQAIQKGESKPEGVDYQKGPRYNLATLREAVFYRDDYTCQVCGRKITDGAILHMHHMFYWKGRHGYQLDELVAVCEKCHTPANHQKGGKLYGFGKDKKFANLSGAAFMNAVRWQIVNALYATYGKEFVTITYGAMTKEKRIILGIEKTHNNDAYAMGDYHPAHRCVFRHYQKRRRNNRVLEKFYDATYIDARTGNKAKGKELFNGRINRNHKKDSENFHKYRSKKVSKGRRSIRRQRYAIQPYDTVRLEGKTYITSGCHNKGTRLLIPVNGKSKSVAISKVQVVCHAGAWIQII

SEQ ID NO: 19589 - protein, 452 aa, unidentified; identical to SEQ ID NO: 3325
  REGION 1..452: note = IscB polypeptide

SEQ ID NO: 19590 - protein, 481 aa, unidentified
MWTTVLRDEKPYGRSSALPVRECVSITKKRRHRMVAVLSKTGIRLMPTSSYRARKLLAKKKAVICGYRPFTIRLTERETGDVQPVELAVDTGYFHVGNSLKTAKHELAAVEIRTLMDEKQRYDDRRRYRRMRRSRLRYRAMRFDNRRRPEGWLAPSIQGRMEQNLAFLRRVLSVVPVTRIVMEMGQFDTQVLKAVEEGRPLPEGTDYQQGERYGIATLREAVFTRDNYTCQCCKKTIHDGVILHVHHIVYRSQGGTNRMGNLITVCEKCHTPKNHKPGGKLYKWKPTVKSFKGATFMTAVRWIMYRFVKECFPDVDVRITYGAKTKLQRRALDITKSHVNDAYAMGDFHPKHRARPVILQKKRRNNRILEKFYDAKYIDTRDGSKKTGQQLFNGRTNRNHNTDTENLRLYRGMKLSKGRRAIRTTRYRIQPHDILVYQGQEMEASGCHCKGTRVMTTAKKSLPIGKVCVRRYSGGYYAVAE

SEQ ID NO: 19591 - protein, 402 aa, unidentified
LRRQRRAKANDTISKKCVKQATAQNGSVSKRAKEIGVIKRHLPGCEKEVLCIGIKNKEAKFSNRTRPEGWLTPTANQLLQTHINLVKKIRKFLPISDVVLEVNKFAFMRLDNPNVQKWQYQQGPLYQKASLEEAVSEMQERHCLFCKKPIAHYHHVVPQSENGSNTIDNIVGLCTKHHDLVHKDTTWQKKLAKKKTGLNKKYGAQSVLNQIIPALTERLNTLFPKHFFVTTGKSTYDYRAAHGVSKDHWLDAYCIACSVLPNDVCDSGINNRVPYELKQFRRHDRRALHKANMSRVYTLNDKAVATNRHKAIKQTTDSLEEFRQNHPDDVYKLKVKEHHPEYRNPKRNFPGCVFLVGKHTHVMQGTSSSHNGQADGYYDTNGNSYSSGKCKFVAKNEGIVFT

SEQ ID NO: 19592 - protein, 413 aa, unidentified; identical to SEQ ID NO: 8326

SEQ ID NO: 19593 - protein, 428 aa, unidentified; identical to SEQ ID NO: 16903

SEQ ID NO: 19594 - protein, 512 aa, unidentified; identical to SEQ ID NO: 6100

SEQ ID NO: 19595 - protein, 406 aa, unidentified; identical to SEQ ID NO: 4082

SEQ ID NO: 19596 - protein, 410 aa, Ktedonobacter sp.; identical to SEQ ID NO: 14375

SEQ ID NO: 19597 - protein, 420 aa, unidentified; identical to SEQ ID NO: 6163

SEQ ID NO: 19598 - protein, 427 aa, Enterococcus sp.; identical to SEQ ID NO: 2410

SEQ ID NO: 19599 - protein, 557 aa, unidentified; identical to SEQ ID NO: 5269

SEQ ID NO: 19600 - protein, 427 aa, Parasutterella sp.; identical to SEQ ID NO: 14005
  VARIANT 159: note = X can be any naturally occurring amino acid

SEQ ID NO: 19601 - protein, 472 aa, unidentified
VVGNRLLSIKPLINIGEGVIYSSICTGLSLQTYQKRKEVPCMVYVLDINGQPLMPTTRHGKVRRLLNSHLAKVVKRCPFTIQLLYQSTKEIQPVSLGVDAGSKHIGMAATTEKKVVYQEELSARNDVVKLLSARRTLRRTRRNRKTRYRKPRFNNRVHSKHKGWLAPSVEVKIQEHITTIKRICQILPISEIQVETAEFDLQRLKAMEEGRTPPVGTDYQLGEQYDFYNTRQYVLHRDGYTCQCCGTHDNNIKLHVHHIESRQTGGDAPNKLIILCEHCHKALHEGKLELPKGKKRGKSYRDATFMGVMRKTLLERLKKEIDVPVEGTYGYITKYWRERAGLEKSHIHDAVCISQYPYAKPLDIYYLTKTVRHHNRQIHKSNFSKGGIRKRNQAPYLVKGFRLFDKVLYQGKEYFIFGRRATGYFDIRTLDGTKVNKGSISYKKLRIQDTANAYLKEIKAIPHMNKFTCVPA

SEQ ID NO: 19602 - protein, 406 aa, unidentified; identical to SEQ ID NO: 17085

SEQ ID NO: 19603 - protein, 453 aa, unidentified; identical to SEQ ID NO: 7420

SEQ ID NO: 19604 - protein, 419 aa, unidentified; identical to SEQ ID NO: 3628

SEQ ID NO: 19605 - protein, 453 aa, unidentified
VGSLSRHLSGERLTISRIILQRGGHPGMQVYVLNKHGQPLMPCSPAKTRRLLEAGKAKVIKRTPFTIQLLYGSTGYKQTIIHGVDAGSKTIGMSASTKSAELFAGEVTPRNDVVKNLSTRREFRRARRNRKTRYRKPRFNNRVRSKHKGWLAPSVEVKIQEHITAIQKVCSILPISKVVVETAEFDLQLLKAIADGKPVPEGEDYQKGEMLGQYNVRQYVLWRDCYACQCCGAHGNGVKLHVHHKESRKVGGNAPDNLVTLCDKCHKGFHEGTISLTKLVKRGRKSTRDATFMGIMRKTLMERLSAALPIPVVETKGYITKGTRVELLKLPKSHINDALAIVQGKHGFGITEPTAITRADRQHTVKPVRHHNRQLHKAAILKSGIRKSNQAAKYVKGFRLFDKVFYQGQECFIWGRRTSGSFLLRTLDGAKVKDGVGAKYLKLLERSSDYLIA

SEQ ID NO: 19606 - protein, 415 aa, unidentified; identical to SEQ ID NO: 13581

SEQ ID NO: 19607 - protein, 238 aa, unidentified; identical to SEQ ID NO: 7175

SEQ ID NO: 19608 - protein, 423 aa, Moorena sp.
MRVFVLNKNLQPLDPCRPARARILLSTGKAKVYRRYPFTIILVEEISNPVTHEHQLKIDPGAKTTGLAVVQRQRVVWGAELTHRGFQIRDNLTSRRQLRRSRRNRKTRYRKPRFLNRTRAKGWLAPSLVSRIENILTWVKKIIRFCPITGISQELVQFDTQKLQNPELSGIEYQQGTLHGYEIREYLLEKWNRKCTYCGAKDTRLEVEHIKPKSKGGSNRISNLTLACHSCNQAKYNQDIELFLAKKPDLSKRILSQAKRPLSDAASVNITRWKLYHDLKSITLPVEVGSGGLTKFNRCRQNLPKTHWLDAANVGKVETLIIEVNNPLLITAKGHGTRQLCRTNKYGFPIRYCSRIKFHKGFQTGDIIRAVVPKGKKIGTYVGRVATRKSGSFNISTKSGLVQGISHKYCQFIHRKDGYAYTN

SEQ ID NO: 19609 - protein, 411 aa, unidentified; identical to SEQ ID NO: 6901

SEQ ID NO: 19610 - protein, 431 aa, Petrotoga sp.; identical to SEQ ID NO: 11592

SEQ ID NO: 19611 - protein, 398 aa, unidentified
LQFYRKEHSIMQYAYVLNKRGEPLMPCSPGKARLLLKQQKACVVKRTPFTIKLLFGSAGYKQPITLGVDAGSKHVGLSASTEKRELYSEEFTPRSDVVELLSTRRQNRRSRRNRKTRYRVPRFDNRVHSKHKGWLAPSVEVKIQEHITVIKHICKILPISLVRVETAEFDTQRLKAMLAGKPLPVGTDYQLGEMYDEYNVRQYVLKRDHYTCQCCGTHNTAKKVVKLHVHHLESRKTGGNAPSNLVTLCTTCHKNLHKGRVTLDGKERGKPLRDAAFMGIMRKTLMVRLKEELPIPVQGTYGYITKMRREQNDIKKSHVNDARCISKHPLAEPCSVCYRTKAIRHHNRQTHKANFSKGGIRKRSQMPYVVEGYRLWDKVLYKGQECFVSGRRASGSFT

SEQ ID NO: 19612 - protein, 430 aa, unidentified; identical to SEQ ID NO: 4817

SEQ ID NO: 19613 - protein, 413 aa, unidentified
MVFVLSKDNTPLMPCLPVVARLLLKQGKAKCVTRTPFVIKLVNETTGYVQGVTFGLDTASSTMGGAAVHENGDVLYLSQVEVRNDIAPKMKARSGNRRNRRNRKTRHRKARWLHRGNSMKTERFSPTMRSKFDTHLKEVAFVKSILPISKIILETGTFDPHALKNPEVLQNKSLYQKGVNYGFANTKAYVLYRDGHICQYCKGKTKDKRVEVHHIIYRNNGGSDEESNLTTLCKTDHDALHKGKIALKGGKKRGQLSHATQMNSIRVQLLRALPAAEETFGFITKEHRQLIGLPKEHYFDAAAIASQGNPVNFRTTTVLHKKSISDGDYQQTKGVRSEQRIPTGKIHGFRKFDKVKYSGNEYFIKGRMSTGYAILMNISGNKIDLKPIPKFDRMERISARKSWIISQKIIASS

SEQ ID NO: 19614 - protein, 456 aa, Halomonas sp.; identical to SEQ ID NO: 12193

SEQ ID NO: 19615 - protein, 378 aa, unidentified
LKFAPRDAAPVPGSATSDLKNCGPGTVVRGKYRVLSPSRGSFSLRKEPYLMKVFVLSQEGKPLMPTTPRRARVWLKAKRARLVRQEPFTIRLRFATKAHVQATKVGVDTGSKDVGIAAIANGEVVFQAEVHLRDDITEKLTQRRQFRRNRRARKTRYREARYDNRRRPDGWLPPSLHSKAEATVKAVRFMASFLPVGRVTVEVGRFDTQRMQNPDIAHLEYQQGELQGYFLREYVLAKWQRTCAYCEAREVPLELEHIVPRSRGGSNRASNLTLACHACNRRKGQQTAAEFGFPDVQAKARVPLKDAAHVSSLKSRVVQDLQAVFGESQVSITYGYETTYKRLQVLDLPKSHTNDAVAIACEISEVVKPLKMVIRSAV

SEQ ID NO: 19616 - protein, 406 aa, unidentified; identical to SEQ ID NO: 13750

SEQ ID NO: 19617 - protein, 470 aa, unidentified; identical to SEQ ID NO: 2825

SEQ ID NO: 19618 - protein, 472 aa, unidentified; identical to SEQ ID NO: 10895

SEQ ID NO: 19619 - protein, 465 aa, unidentified
MSTCVCVLSNSGERLMPTFRLGKVRHLLKDGKAKIVKHHPFTIQLLYDSKTNTQPIEICEDVGYNYIGISVKSQSHEYVSAQYDTLQDEKACHDSCRKLRRTRRNRLRYRKPRFDNRKRGEGWLAPSLRHKKELNVNVVKMYCAVMPITHATVEVGSFDTMLVKAIQEGKAIPEGADYQKGPRYNLATLREAVFYRDNYTCQVCGRKIADGAILHMHHMFYWKGRHGDSLNELLTVCEKCHTPANHQKSGKLYGFGENVKFADLSGAAFMNTVRWQIVNELYAAFGKDFVTVTYGAMTKEKRIALRLEKSHNNDAYAMGEFHPNHRCTFEHYEKVRRNNRILEKFYDSRYIDIRTGEIATGKELFNGRINRNHKKDSENLHRYRGKRTYAGHRALLRKKVNLNPGDLVSLNGEVLVVHGTHTNKKGAVNVEFKTPGKSGQKSASLKKLKIVKAADSMHSAWEKIS

SEQ ID NO: 19620 - protein, 279 aa, unidentified
VVVETAEFDLQLLKAIADGKPVPQGEDYQKGEMYGHYNVRQYVLWRDNYTCQCCGTHPSKKKEVRLHVHHLESRKVGGDAPDNQVTLCESCHEKLHKGLIAEKDFKKRKRRSTRDATFMGIMRKTLMQRLCSELPIPVVKTRDYITKATREKLLVLPKSHTNDALAIAQGKQGFNVGYLPGIVQIDKICTIRPVRHHNRQLHKATILKGGIRKSNQTEKYVFGYCLFDKVQFNGQDCFIWGRRTTGIFTIKTINGKMIKDGISFKKLKPVEKSTGYLIA

SEQ ID NO: 19621 - protein, 458 aa, unidentified; identical to SEQ ID NO: 16953

SEQ ID NO: 19622 - protein, 418 aa, unidentified
MVYILNKHNEPLMPCSERKARLLLKDGMAIVCRKDIFTIKLINGSYGYKQHITLGVDCSSKHVGVSATTDKQELFSANAELRNDVVKLLSDRRMLRRNRRSRKTRYRKPRFNNRIVKNGWISPSIKQKIQSHFNLVDFLHKLLPISKIVIETASFDIQKINNPSISGSEYQQGEQLDFFNVREYVLFRDNHTCQHCKGKSKDKVLNVHHIESRKTGGDSPNNLITLCETCHKAYHRGEFELNVKRGKSFRDSAFMGIMRWELYDELKLRYDNVSMTFGYITKYKRIKLGLDKEHYNDAYCICGNLAAKMLSAHHFIRFIPRHSRVLHIQKFSKGGVRRSASAPYWLNGGKPSKSGAMFTMFDKVKFNGIVCFISGSSNGYAALRDINWNKIDGCKTVVTVNKLLLISRKYGGFIVEKK

SEQ ID NO: 19623 - protein, 421 aa, unidentified; identical to SEQ ID NO: 2738

SEQ ID NO: 19624 - protein, 431 aa, unidentified
MPNKVYVINKHGRPLMPCSPAKARHLLDAGKAKVKKRTPFTIQLVYGSSGYTQEVILGVDAGSKTIGMSASTTKEELLSAEVKPRNDVVDLLSTRREFRRARRNRKTRYRKPRFDNRVRSKHKGWLAPSVEVKIQEHITSIKRVCRILPVSKVVIETAEFDLQLLKAIADGKPVPQGEDYQKGEMYGHYNVRQYVLWRDGYTCQCCGAHATKKKEVRLHVHHLESRKVDGDAPDNQVTLCESCHEKLHKGLIAEKDFKKRKRRSTRDATFMGIMRKTLMQRLCSELPIPVVKTRGYITKATREKLLVLPKSHTNDALAIAQGKRGFNVGYLPEIAQIDKIYTIRPVRHHNRQLHKATILKGGIRKSNQTEKYVFGYRLFDKVQFNGQDCFIWGRRTTGIFTIKTINGKMIKDGISFKKLKLVEKSTSYLIA

SEQ ID NO: 19625 - protein, 399 aa, unidentified
ARLLLKQQKACVVRRTPFTIKLLHGSAGYKQPITLGVDAGSKHVGLSASTEKRELYSEEFTPRNDVVELLSTRRQNRRSRRNRKTRYRAPRFNNRVHSKHKGWLAPSVEVKIQEHITVIKRICRILPITLVRVETAEFDTQRLKAMLAGKPLPVGTDYQLGEMYDEYNVRQYVLKRDNYTCQCCGAHTTAKKTVKLHVHHLESRKVGGNAPSNLITLCTTCHNNLHKGKITLDGKKRGKTLRDAAFMGIMRNTLLTRLRNELNIPVQNTYGYITKLLREQNDIKKSHVNDARCISKHPLAKPCSVCYRTKAIRHHNRQIHKAKILKGGIRKANQAPYIVKGFRLWDKVLYNEQECFISGRRSSGYFALRKFDGTTITNSISFKKLRLLEPATNYLIERK

SEQ ID NO: 19626 - protein, 350 aa, Microcoleus sp.
MSNYVFLIDQNKTPLNPLHPSHARKFLNSGKAAVFRRYPFTLILKRVVDNPNVYPLTLKIDPGSKFTGIALVTSRGDVIWGMELQHRGQQIKDALEHRRAVRRGRRNRNTRYRQARFLNRKRPDGWLAPSLRHRVLSTETWVKRLQKFAPIGSIVQELVKFDTQAIQNPEISGTEYQQGTLHGYECREYLLFKWNRQCAYCGVKDVPLEIEHIQPKSKGGSDRISNLCLACHKCNQRKGNRDIKDFLKGKPDVLNRLLRQAKAPLKDAASVNSTRWTLFTALKRFGLAVRTGTGGRTKFNRIRFELPKAHWIDAACVGVVETIKLVTTKILKVKATGFGGRQRCQTDKFG

SEQ ID NO: 19627 - protein, 339 aa, unidentified
MGRRSAASKNPFEQGRSGPTAARLTYLRKRDTMVYVLSKEGKPLMPTERHGKMRRLLKEGKARVVKARPFTIQLTYETTKYTQPITLGIDAGNQRVGFSVITEKKELLAGECQLLQVQAERNRERLMYRRQRRNRLRYRKPRFDNRRKPEGWLAPSLQNKLDAHIRLVEKIKSILPITQVIVEVANFDIQAIKNPGIQGVAYQQGEQYNFWNLREYILHRDNHECQNPGCKNRSKNPKLQVHHIGYWKGDYTDKPGNLITLCSKCHRPENHRESKLLWGWQPKVKSFRAETFMSTVRWKLVNTLGCEYTYGYITKSRRTELRLEKSHVSQPPRTEVRGL

SEQ ID NO: 19628 - protein, 413 aa, unidentified
LKVFVLNMRGKPLMPCSPAKARHMLKAGKAFVVRRTPFTIKLTIATGETKQDVTLGVDAGARHVGISATTEKEEVFASEVALRQDITGLLADRLAFRRARRNRKTRYRAPRFNNRVRSKHKGWLAPSVENRIQAHISRIEAVCRLLPVTKIVIETASFDIQKIRNPEVEGTGYQQGDQLGFWNVREYVLFRDGHICQHCRGRSKDPILNVHHLESRKTGGDAPNNLITLCETCHKAYHAGKIKLKVKRGQSFRAEAFMGIMRWTLLNRMRKAHPSLPVENTYGYLTKHKRIALGLPKTHCADAFCIAGNLKALRRGDFLFLQQTRKHNRQIHKCSILKGGVRKLNQAPFLVKGFRLFDKVRIGGQIGFVFGRRVRGTFNIRRLDKTVIGTDINCKKLSLLETRKTFLTELRKE

SEQ ID NO: 19629 - protein, 434 aa, unidentified; identical to SEQ ID NO: 6832

SEQ ID NO: 19630 - protein, 671 aa, unidentified; identical to SEQ ID NO: 2453

SEQ ID NO: 19631 - protein, 453 aa, unidentified
LNETTILKTFFAAFNLTKTVVQMDAWDIIVVLNKRGKPLMPCSPAKARLLLKEKKAIVVRRTPFTIQLTIATGESKQPVSLGVDAGYKHVGLSASTEKAELYASEVELRQDVSDLLSARRALRQSRRNRKTRYRAPRFDNRIRTKRKGWLAPSVENRINAHLSRIEAVLRLLPVTKITVETASFDMQLLKNPDIAGKEYQEGEQLGFWNVREYVLFRDGHVCQHCYGRSKDPVLNVHHLESRRTGGDSPGNLITLCETCHKALHRGDITLKAKRGKSFRAEAFMGIMRWEVHNRLRALHPGIEVSNTYGYQTKHARIANGIAKSHCADAFCIAGNLGAERLCEFFFQKQTRRNHRQIHKLSILKGGIRKRNQAPFEVKGFRLFDKVACQGEEGFIFGRRSSGFFDVRKLDGTRISAGISCKKLHLLEKRRTYLTEIRKEEALLALPEGRSLRT

SEQ ID NO: 19632 - protein, 443 aa, unidentified; identical to SEQ ID NO: 5872

SEQ ID NO: 19633 - protein, 420 aa, unidentified; identical to SEQ ID NO: 10678

SEQ ID NO: 19634 - protein, 442 aa, unidentified; identical to SEQ ID NO: 2903

SEQ ID NO: 19635 - protein, 413 aa, unidentified
MTSYAFVLDANGKQLAPAKEQKAWFLIRKKRAALVSKYPMVIQLKKEIPENEICQDEIRCGIDDGGLHVGIALVQKCKTKNKVVFKGTIEQRNDVKHLMEVRRSYRHYHRYHKRYRQARFDNRKSSKRKGRIAPSILQKRQATIRVINRLNKWINITNYWLEDVSIDIRALTDGYKPYRWQYQKSNRLDENIRKAAILRDGGKCMECGKSNCRLEVHHIKPRRRNGSNTLDNLITLCESCHQKTEGQEELYMDRYFSLLKSSDHKNLNYAQHVMIGKEWLRKQLSSLGVLYLTNGGDTANKRIDWNIEKSHANDAVCITNLQPDTYDMKEWTVKPMRRQSKAKTDNVLGIKHRDLVEYTLKNGETHRGYVTALYPEQKAINFQSQTKHCKKVNARKCKLLWNYSKIYWFENAS

SEQ ID NO: 19636 - protein, 415 aa, unidentified; identical to SEQ ID NO: 13751

SEQ ID NO: 19637 - protein, 408 aa, unidentified; identical to SEQ ID NO: 5694

SEQ ID NO: 19638 - protein, 559 aa, Streptomyces sp.; identical to SEQ ID NO: 7416

SEQ ID NO: 19639 - protein, 413 aa, unidentified
MTSYSFVLDVNGKPLAPTKEQKAWFLIRKKRAALVSKYPMVIQLMKEIPEKEICQDEIRCGIDDGGLHVGIALVQKCKTKNKVVFKGTMEQRNDVKHLMEVRRGYRRYHRYHKRYRQARFDNRKSSKREGRIAPSILQKRQATIRVIHWLNKWINITNYWLEDVSVDIRVLTDGYQSYRWQYQRSNRLDENIRKAAILRDGGKCMECGKSNCRLEVHHIKPRRRNGSNTLDNLITLCESCHQKTEGQEELYMDRYFSLLKSSNNKNLNYAQHVMIGKRWLRKQLSGLGVLYLTSGGDTANKRIDWNIEKSHANDAVCITDLQPDTCDVKEWTMKPMRRQSKAKTDHVLGIHHRDLVEYTFKNGETHRGYVTALYPEQKAINFQSPTKHCKKVNARKCKLLWKYSKIYWFENAS

SEQ ID NO: 19640 - protein, 456 aa, unidentified
VWLYQAVYNLGEGFLPSSEERTAFYWLLIYRKEHGIMQYVYVLNKHGEPLMPCSSGKARLLLKQQKACVVKRTPFTIKLLFGSTGYKQPITLGVDAGSKHVGLSASTEKRELYCEEFTPRNDVVDLLSTRKQNRRSRRNRKTRYRAPRFDNRVHSKRKGWLAPSVEVKIQEHITVIKRICRILPITLVRVETAEFDTQRLKAMLEGKPLPVGTDYQLGEIYDEYNVRQYVLKRDHYTCQCCGAHTTTKKTVKLHVHHLESRKVGGNAPSNLITLCTTCHDALHKGKVSLDGKERGKPLRDAAFMGIMRKTLMARLRDELSIPVQGTYGYITKMRREQNDIKKSHVNDARCISKHPLAEPCSVCYRTKAIRHHNRQTHKANFSKGGTRQRSQMPYVVEGYRLWDKVLYKGQECFVSGRRASGSFTLKKLDGTRISKGVTFKKLRLLEPATNYLIERM

SEQ ID NO: 19641 - protein, 423 aa, unidentified; identical to SEQ ID NO: 4024

SEQ ID NO: 19642 - protein, 424 aa, unidentified; identical to SEQ ID NO: 3351

SEQ ID NO: 19643 - protein, 413 aa, unidentified
MTSYAFVLDANGKQLAPTKEQKAWFFIRKKRASLVSKYPIVIQLMKEIPEKEICQDEIRCGIDDGGLHVGIALVQKCKTKNKVVFKGTMEQRNDVKHLMEVRRGYRRYHRYHKRYRQARFDNRKSSKREGRIAPSILQKRQATIRVIHWLNKWINITNYWLEDVSVDIRALTDGYQSYRWQYQKSNRLDENIRKAAILRDGGKCMECGKSNCRLEVHHIKPKRRNGSNTLDNLITLCESCHQKTEGQEELYMDRYFSLLKSSDNKNLNYAQHVMIGKMWLRKQLSGLGVLYLTSGGDTANKRIDWNIEKSHTNDAVCITDLQPDTCDIKEWAIKPMRRQSKAKTDHVLGIHHRDLVEYTFKNGETHRGYVTALYPDQKAINFQSQTKHCKKVNARKCKLLWKYSKIYWFENAS

SEQ ID NO: 19644 - protein, 424 aa, unidentified
MVYVISQKNKPLMPCSSPIARLLLKLGRAKVKKREPFTIKLTYETTNYIQNLTLGVDTGSGTIGTAVSNDNSDIVYMSEVIVRNDIMDKMTQRRKYRKNRRGRKTRYRKARWLNRANSTKTDRFSPTMQSKLHSHVKEIEYIKSILPITTMVFETGQFDTHLMKNPNLANPKVKHWGYQKGGNYGFENTKAMVLNRDNYTCQCCKGKHKDSKLEVHHIVFRSQGGSDEESNLLTLCHTCHKDLHSGKINPKLSGKVKGNLKYATQMNSIRKQLFRCYPNAIETFGYVTKVNRLHLGVAKEHYYDACTIATQGNIFTVKSNLYKKKCVSDGDFQKTKGIRSEQPIVTDKICGFRKFDKVRYFGNDYFIKGRMSTGYAVLMDIDGNKADFSAMPKGYKTPKMVKLKRIEARTTWMITTVEVTPNIA

SEQ ID NO: 19645 - protein, 429 aa, Moorena sp.
MCNYVFVLDASHKPLNPCRPVTARKLLTAGKAAVYRRYPFTIILKKQVEAEPKPMSLKIDPGSKITGLAIVYGNQVVWSAEIEHRGSKIKSALDSRRAVRRSRRNRKCRYRKPRFNNRKRPEGWLAPSLQHRVATTMTWVLKLMKLTPIGGISQELVRFDTQKLQNPEISGIEYQQGELMGYEVREYLYQKWGRQCVYCGANSVKLEIEHIVPKSKGGTNRVSNLTLACHGCNQAKGNLDARDFLSGKPDVLKRILGKAKQPLLDAAAVNSTRWQLYQSLKETGLSVAVGTGARTKYNRIKLGLPKGHWVDAACVGEVATLKIVTRQPLLIKAMGHGCRQVIQMDKYGFPRKGYKPKHPVKGWKTGDIVNVVAGKNAGLKGVRIKSVRAKGNFDLIGSFNGASKKVLSASQNYIQCVHRHDGYSYSFAE

SEQ ID NO: 19646 - protein, 426 aa, Parasutterella sp.; identical to SEQ ID NO: 3045

SEQ ID NO: 19647 - protein, 320 aa, unidentified
MPITHATVEVGSFDTMLVKAIQEGKAIPEGADYQKGPRYNLATLREAVFYRDNYVCKVCGRKATEGAILHMHHMFYWKGRHGDSLDELLTVCEKCHTPANHQKSGKLYGFGENVKFADLSGAAFMNTVRWQIVNELYAAFGKDFVTVTYGAMTKEKRIALRLEKSHNNDAYAMGEFHPNHRCTFEHYEKVRRNNRILEKFYDSRYIDIRTGEIATGKELFNGRINRNHKKDSENLHRYRGKRTYAGHRALLRKKVNLNPGDLVSLNGEVLVVHGTHTNKKGAVNVEFKTPGKSGQKSASLKKLKIVKAADSMHSAWEKIS

SEQ ID NO: 19648 - protein, 440 aa, Bacillus sp.
MNLRGEMLMPCSPRKARILLKEQKATIVRHNPFTIQLLYATGEATQETRLGIALGAKCVGIAITSNEKVFGKAELELRQDVKGNLETKKTYRRGRRNRKTRYRRSKFKHKTKRVYVEGKRTKRGMYHKVSVSFTSKRPNGWLPPSIQSRIQNTFYWIDTLYSLLPTCNIHIEVGKFDVQKMRSPNIQGREYQEGDTFGYHDVRYFVLARDYYTCQVCKKKGGILQTHHIIYKSHGGSNAACNLVTVCTSCHTYENHQEDNIFWKWMIEKKKTKRYKEGPFMNIFRRRVFEKYPEAHITYGSMTTPRRKILELEKTHSNDAIASTGITAIKENPANVLFIKQFRKKKRSLHEATARKGRKEKNTLAKRNEKNTKAVGTWQLNDKVRVFGQVGWISGFSGQCCYVKNIQGDYVTVPGKSYKQVNLSSLELLCHNANWQFAIL

SEQ ID NO: 19649 - protein, 423 aa, Microcoleus sp.
MQNYTFVLDTNKRPLDPVHPAVARKLLSNGEAAVFRRYPFTIILKRGVDTPTQLIEIKLDPGSKTTGIALLKGEKLIFVAELNHRGQAIKASLDSRRAIRRCRRARHTRYRQARFLNRTRPKSWLAPSLKHRVDTTLTWVNKFIRFAPVNSIAMELVRFDFQQLEKPEISGVEYQQGELLGYEIREYLLNKWDRKCTYCNTENIPLQVEHIHPKAKGGSNRISNLCLACEKCNLKKGTQDIKDFLSKKPDLLKQIMVQVKRPLKDATAVNSTRWALFNQLKLTELPVTTGSGGQTKYNRTRLELPKTHYFDAACVAKVDKLVVLTDQPLLIKANGHGTRQMCRTDKFGFPSRYVPRDKFVKGFQTGDLVKAVVTSGKKIGEYVGRVAVRSSGFFNISAKELVQGINHKYCQIIHRKDGYSYQF

SEQ ID NO: 19650 - protein, 449 aa, unidentified; identical to SEQ ID NO: 12479

SEQ ID NO: 19651 - protein, 424 aa, unidentified
MRVFVFNMRGRPLMPCSQRKARLLLRENKAKIYKYHPFTIQLTYTTGETKQDCHIGIDTGSKYIGAAVRSEDKVFWKGEIELRQDIRSNLDTKRIYHRSRRNRKTRYRKPRFLNRKRRDEWLPPSLQSRINHTFHWIDTLSSLVPNPILHIEVGKFDVAKMINPEIHGVDYQHGQTYGFFDERYFVFARDNYTCQCCGKSKNKILNTHHIIYRSNGGTNRVDNLITVCTDCHTSQNHRKGGIFYQWQEQHKKVKQYKEPPFMNTLRKRIFVAYPDAEITYGSETTPKRKAMKLDKTHYNDAIVISGINEIKENPEEWLLIKQFRKKKRSLHEATARKGRKKPNRNQTRNSKNTPYYKGFYLNDKVSVFGKSGYITGFTSNAAYIKDENNDYITLPNKTYKQVSINKMKLECHNNNWQYIIKNAV

SEQ ID NO: 19652 - protein, 440 aa, unidentified
VLSVPSSKSANQETNLTLWLDHRETHEQEYAFVLDAEGKKLDPTIIQNAWRLVRQKKATLIAKRPMTIQLKKAIDSPNDDEIRMGIDDGAKHVGLALVQKCKTKNKVIFVATMEHRNDVHKKMEQCKNYRRYRRYWKRYRKARFSNRASARRKGRVAPSILQKRQAVVRIFDRLSKYIRIDSIYLEDVAVDVRVLTDEKKLYSWQYQQSNRLDENLRKATILRDKCQCQMCGKKNCRLEAHHITPKRMSGTDTIGNLITLCSDCHSKVTGREMEFAEQFYTKIKRKKNNYNLQDATHSMVGKTWLREKLSLRKPVLLTTGGDTANKRIDWNLEKSHEIDAVCITDLRPESINVKHWKVKPLRHQRKKMKVEELCGFRHRDIVCYTFQNGEYHEGYVTALLLADKTHADSLSFMSATKHCCRINPKKCKKLGHANKFLWLL

SEQ ID NO: 19653 - protein, 424 aa, unidentified; identical to SEQ ID NO: 13009

SEQ ID NO: 19654 - protein, 462 aa, unidentified
MSVLVIGRNGRALMPTNPRKARLLLKKKTASVVCRHPFTIQLLYKTGCATQEGSIGIDTGSQHIGVGITCGDRVILKDEHALRSSMEKRSLLATRAVMRRGRRYRKVRYRKPKWRHHTKRMYFEKANRRGQHWRKVKTTTQSPRSKGWLPPSLQSKCDHHFRIIDRYLKYLPDPITRNLVIEAGRFDMARMNDPTIHGEMYQRGPMYDAENLRAYIFARDNYQCACCKAKAGTTRKADGTTVKLVTHHILFRSRGATDNPKYIISVCDHCHTTKAHQPGGILYSWMENNKKVARGLRDATFMNILRKRLFARYPQAAFTYGNITAADRKKLRLPKSHANDAVAISLFGKEASTVKNICQTMHYKQIRKSKRSLHEAIPRKGRKNPNTKAVRNKKNTTQVNGFKLWDSVLADGKKLFICSFTGTSAYLIDKNGCYISQPGKTYKQWPLSKLKRLHPNGNWLMA

SEQ ID NO: 19655 - protein, 544 aa, unidentified
MKQKKQKVMVYILNKKGKPLMPTTRCGHVRKLLNSKKAVVVNSNPFTIRLKYDTPNGVQDVFAGIDSGRENIGSGASNEDGDCLYLGELKTSNKSIKLKMTERAGFRKERRRHDRQNKQRKARKDHTEIQNGNADICRTTISCKSVQISYPAAEKSVTHKIIRGKEGKFANRHRDEGWITPSARQLVQMHMNDLKSMCKILPISHVTLERVAFDFQKLENENIKVWEYGKGKLYGYDSPEEYIHDVQNGKCLVCGKPHIDYLHHIIPRSKGGSDKVSNIAGLCYDCHYGPMGVHNCQNTQDRLPELKSEANKQYKVSLLNSVMPVLIEEMDKFCKANSIMFSICEGHDTAKVRDMYDLQKDHCIDGFAISLVDRNVKSVDVMPDRIYQKQRYKKKSKNIIQKRNCREYYDDKKLVAVNRHKGTDQKADSLEEYMNTYAETHTTDECKKHFDSLVVKPARRTYTFHKEGRICPLHIGDKVRYEKKNKIKGNTKVDTFICEGIYFSKDENKAKVEHNKTKSKKMKFCRVLESGCTPYVDYRKLALM

SEQ ID NO: 19656 - protein, 386 aa, unidentified
LTIATGESKQPVSLGVDAGYKHVGLSASTEKAELYASEVELRQDITDLLSARRALRQSRRNRKTRYRAPRFDNRIRTKRKGWLAPSVENRINAHLSRIETVIRLLPVTKISVETTSFDMQLLKNSDIAGKEYQEGEQLGFWNVREYVLFRDGHVCQHCHGRSKDPVLNVHHLESRRTGGDSPGNLITLCETCHKALHRGEITLKAKRGQSFRAETFMGIMRWEVLDRLKASHPKLEVQNTYGYRTKHARISNGIAKSHCADAFCIAGNLGAERLGEFFFQKQTRRNNRQIHKLSILKGGIRKRNQAPFEVNGFRLFDKVACKGEEGFIFGRRSSGYFDVRKLDGTHISAGISYKKLRLLEKRQTYLTEIRKEEALPPLPEGRGLRA

SEQ ID NO: 19657 - protein, 423 aa, unidentified; identical to SEQ ID NO: 3576

SEQ ID NO: 19658 - protein, 418 aa, unidentified
MPTERFGKVRRLLREGKAKVVRREPFTIRLLYEPETDVVQECYCGVDTGSKHIGVAVVGNDKVLYQSQTELRSDIKQKMDRRRAFRRNRRNRKTRYRKCRFLNRQNSIREDRLPPSVNHKVQAHIDEIEFCKKILPVLDENIILEVSQFDTALMKNPSLINEKVKHWGYQQGFNYSYSSRQKAILHRDNYTCQCCGKKNCRLEVHHIKFKSNGGTDDEENLITLCEDCHKGVHAGTVVLNKKPKNSKNLKYATHMSIIRIRLLKKYPNAIETFGFVTAENRNHLQLEKDHYIDACVIASGGLEFKKLDVIYKKRRVSVQDRVLTKGIRGEKKIPTGKVHGFKRYDRVKYLGEICFVKGRRIKDGFVLMDIDNNAIDFRDIGGRQNPSYKSIERLNTRRSILCIYKRIEREVRFIPILS

SEQ ID NO: 19659 - protein, 452 aa, unidentified; identical to SEQ ID NO: 6924

SEQ ID NO: 19660 - protein, 414 aa, unidentified
MPCSPAKARLLLKEKKAVVVRRTPFTIQLTIATGETKQPVSLGVDAGYEHVGLSASTEKAELYASEVELRQDVSDLLSARRALRQSRRNRKTRYRAPRFDNRIRTKRKGWLAPSVENRINAHLSRIETVLRLLPVTKITVETASFDMQLLKNPDIAEKEYQEGEQLGFWNVREYVLFRDGHVCQYCHGRSKDPVLNVHHLESRRTGGDSPGNLITLCETCHKALHRGEIKLRAKRGQSFRAETFMGIMRWEVLNRLKASHSKLEVNNTYGYLTKHARIKSGITKSHCSDAFCIAGNLGAKRLGEFLFQKQTRRNNRQIHKLSILKGGIRKRNQAPFEIKGFRLFDKVACKGEEGFIFGRRSSGSFDVRRLDGTRISAGISYKKLRLLQKRQTYLTEIRKEEALPPLPEGRDLRA

SEQ ID NO: 19661 - protein, 433 aa, Hydrocoleum sp.; identical to SEQ ID NO: 15673

SEQ ID NO: 19662 - protein, 443 aa, Actinomadura sp.; identical to SEQ ID NO: 16181

SEQ ID NO: 19663 - protein, 440 aa, unidentified
MIERKCQVVYIISKNNKPLMPTTRHGKVRRLLRDKKAEIIKREPFTIKLLYETTNEALQPINLGVDAGSKMIGLSATTEKQELFKGEYELRNNISNKLTNKRELRRTRRGRLRYRKPRFNNRVSSKKKGWLAPSVEHKINSHLKIIEDLCKILPISKIIVEVASFDIQKIKNPDIEGKEYQEGEQLGSWNTREYVLFRENHICQHCKGKSKGPILNVHHIIGRKDGGSNSPSNLITLCKTCHHDYHQGKIELKVKGAPSFKDSAFMGIMRWAFYNKLKEIYPSVNLTYGYMTKNKRIKLGLAKTHYNDAYCIADNLEANRLDSYYYYKKARCHNRQIHRANILKGGRLKRNQAPYRVKGFRLFDRVKYQGKSYFIFGRRETGYFDIRDLAGNKINKGSISYKKLKLVEPKKSVLIERRGAKDEEQFLPATKVGGFLTQVL

SEQ ID NO: 19664 - protein, 408 aa, unidentified; identical to SEQ ID NO: 8155

SEQ ID NO: 19665 - protein, 443 aa, unidentified
VVKANGTAVFTAHLETRNKEIPKLMQDRKKARRARRTNGRRCRRQRRAKANGTISKKCVKQTTAQNGSVSKRAKDIGVIKRRLPGCEKDVLCIGIKNKETKFTNRTRPEGWLTPTANQLLQTHINLVKKIQKFLPISDVVLEVNKFAFMRLDNPNIQKWQYQQGPLYKKESLESAVSEIQEHHCLFCKKPIDHYHHVVPQHKNGSNTIGNIVGLCAKHHDLVHKDSAWEKKLAQKSTGLNKKYGALGVLNQIIPTLTNELSSLFPKHSFVTNGKSTYDYRAAHGVSKDHWLDAYCIACSVLPSNVCDSNINNHMPYELKQFRRHDRRVLNNENMTRVYTLNNKAVAINRHKAKDQKTVSLEEFRKEHPDDVCKLKVKEHHPTYRNMNRNFPGSVFLVGKQIHVMQGIASSKDGKATKYNDTSATAIAAGKCKFVAKNTGILFV

SEQ ID NO: 19666 - protein, 512 aa, unidentified
MSTVYVLNKNGKPLMPTTRCGHIRYLLKEKKARVVASKPFTIQLLYETNDVVQPLYLGIDPGRTNIGVAVVKTDGTAVFTAHLETRNKEIPKLMKKRKDSRRARRTNGRRCRRQRRAKANDTISKKCVKQATAQNGSVSKRAKEIGVIKRHLPGCEKEVLCIGIKNKEAKFSNRTRPEGWLTPTANQLLQTHINLVKKIRKFLPISDVVLEVNKFAFMRLDNPNVQKWQYQQGPLYQKASLEEAVSEMQERHCLFCKKPIAHYHHVVPQSENGSNTIDNIVGLCTKHHDLVHKDTTWQKKLAKKKTGLNKKYGAQSVLNQIIPALTERLNTLFPKHFFVTTGKSTYDYRAAHGVSKDHWLDAYCIACSVLPNDVCDSGINNRVPYELKQFRRHDRRALHKANMSRVYTLNDKAVATNRHKAIKQTTDSLEEFRQNHPDDVYKLKVKEHHPEYRNPKRNFPGCVFLVGKHTHVVQGTSGSHNSKADGYYDTNGNSYSSGKCKFVAKNEGIVFT

SEQ ID NO: 19667 - protein, 457 aa, unidentified
PVLQPITIAEDPGRSNIGMAVVSLSGELFSAAVVQTRNKEIVKLMDKRKQHRRASRNGERKARQRLAKKCHTMIKAGFLMRKLPMYGKDKRVKCLVIKNTESRFCNRKREDGWLTPSAEHLVQTHINLIHKMQKFLPITDVAIEINRFAFLSLEDPSISGVDFQNGPLKGYDDLNAAIEDLQDGHCLMCNSPIEHRHHIVPRSMQGSNTIGNIAGLCCKCHEKVHKSTAFEDSLKKKKAGLNKRYAAISTLNQAIPFICKRLEQEFGKEHVHYCSGRDTSMVRRSFGYHKTKEEQLHEVDAWCIAVLSLQQIPEKAPEFDHVHEILQFRRQDRSRIKAQTSRAYYYKGKKIAKNRKKAEGQREDSLQEWRKRQVERYGEEQTRKMISQLKVKKSIRRYNRLDRLMPGAVFYYQGIRYVMRGQHCEGTYLQAVGMGSKDFPAKKCKIVAHNEGLVFVS

SEQ ID NO: 19668 - protein, 462 aa, unidentified
  source 1..462: note = Firmicutes sp.
MIHTADKNGNPGHPTKRFDMVRKLRKRGKMRIIGGGASGKPPVAVFLQKEFDYSKTVERKFFIVLDPGYRYIGFVVCEVKDGKLIIYCRGTLRTRIPDIKSLMNSRRAYRRFRRYLSRFKNKRLSVKHRRAMTKFKAPRYIRSREKLNATLKHGTETHLNLYRKLLKLFSLPASQTQLIMEDNVFNTRVMTWGQAFGEDYQESPYTPNEEKCLVCSTEDSLQEHHLIQRKKGGTEVKGNKIYLCESCHDDIHAGRIYLPIKGIQWRELGTMNVIIGMLRKIPWIKFIPASNTICERKRLNLSKSHANDALATAAAIYCGIKIDNSQERYLELAQFRRHNRARTHALRDRLYKLNGKIVARNRQKKADQKENSFADISLIPAEQKGLKVYPGKKIPKPFRENMPTIGGDVWLHLSTGQRFVATSVTSEKYIYSPALKEIVGGSYVHPDQCRRLLRNEGMVVLN

SEQ ID NO: 19669 - protein, 412 aa, Bacillus sp.; identical to SEQ ID NO: 11231

SEQ ID NO: 19670 - protein, 419 aa, unidentified; identical to SEQ ID NO: 4877

SEQ ID NO: 19671 - protein, 427 aa, Scytonema sp.
MSKIFVIDSEKRPLLPIHSAQARQLLRNQKAAIFRRFPFTIILKEWRPNSPVSPLRLKIDPGAKHTGIALVNDLNGDVVFAAEVKHRGFAIRDALTSRRQLRRGRRARKTRYRQPRFLNRTRPQGWLAPSLQSRIDNIKTWVEKLRKFAPIKAISQELVRFDMQLMRNPDIQGKEYQQGTLVGYETREFLLEKWNRQCAYCGVKDVPLQIEHIHPIAKGGSNSITNLTLSCSKCNTKKGSKDIKDFLKKDPSRLEKILKQAQRPLADAAAVNTTRFALLTALKETGLPVETGSGGLTKFNRAQQELPKQHWLDAACVGKSTPILNVKNIRPLLITANGHGSRQSCRTDKFGFPNRHVPKKKIHFGFQTGDIVNAVVKTGKKIGNYVGKVAIRSSGSFNISTKNGLVQGISHKFCKRIHAKDGYSYAT

SEQ ID NO: 19672 - protein, 425 aa, Moorena sp.; identical to SEQ ID NO: 4593

SEQ ID NO: 19673 - protein, 415 aa, unidentified; identical to SEQ ID NO: 8202

SEQ ID NO: 19674 - protein, 493 aa, unidentified
MAAVYVISASGKPLMPTTRCGHIRGLLNAGKARVVEREPFTIQLKYETPDVTQPLYLGIDPGRTNVGSAVVREDGECVFTAQLTTRNKDVPKLMKARKQFRMAHRRLKRRCKRQRRAKAAETLSQKGEFQRLLPGYEEPILCKGIRNKEARFNNRQRPAGWLTPTANHLLLTHLNMVKKLQKLLPITDVVLEVNRFAFMAMENPSIRRWQYQQGPLYGKGSVEDAVYAQQDGHCLFCGKPIAHYNHVVPQHKNGSETLENRVGLCNEHHDLVHKDRAWDAKMKETKAGLNKKYHALSVLNQIIPALTEQLTAMFPQHAFVTTGKDTADFREDYGIAKEHHLDAYCIACSVLAEPTKVAAPTGKPHRLMQFRRHDRQVCHKENIKRVYLSEGKAVATTRHKAIEQKDDSLEEFRKTHTQQEVSALTVKDHQPVYKDMRRFMPGGVFLFNGKVHTLQRSHGRYKGMPFYYIDTDGSKNHAKGCIFLQQNCGLRWV

SEQ ID NO: 19675 - protein, 438 aa, Petrotoga sp.; identical to SEQ ID NO: 8698

SEQ ID NO: 19676 - protein, 557 aa, unidentified
MIYNLVSTRERSFMKQKKQKVMVYILNKKGKPLMPTTRCGHVRKLLDSKKAVVVNSNPFTIRLKYDTPNGIQDVFAGIDSGRENIGSGASNEDGDCLYLGELKTSNKSIKLKMTERAGFRKERRRHDRQNKQRKARKDHTEIQNGNADICRTTISCKSVQISYPAAEKSVTHKIIRGKEGKFANRHRDEGWITPSARQLVQMHMNDLKSMCKILPISHVTLERVAFDFQKLENENIKVWEYGKGKLYGYDSPEEYIHDVQNGKCLVCGKPHIDYLHHIIPRSKGGSDKVSNIAGLCYDCHYGPMGVHNCQNTQDRLPELKSEANKQYKVSLLNSVMPVLIEEMDKFCKANSIMFSICEGHDTAKVRDMYDLQKDHCIDGFAISLVDRNVKSVDVMPDRIYQKQRYKKKSKNIIQKRNCREYYDDKKLVAVNRHKGTDQKADSLEEYMNTYAETHTTDECKKHFDSLVVKPARRTYTFHKEWRICPFHIGDKVRYEKKNKIKGNTKVDTFICEGIRFVKDENKAEVKHNKTKSKKMKFCRVLESGCTPYVDYRKLALM

SEQ ID NO: 19677 - protein, 423 aa, unidentified; identical to SEQ ID NO: 3951

SEQ ID NO: 19678 - protein, 452 aa, unidentified
MSVAVISKTGERLMPTSEYRARKLLKSGKAIKYSYHPFTIQLTERESGDAQSIELCVDTGYIHIGISVKSEKHEYLAEQIDTLTDEKARHDACRMYRRQRRSRKRYRQPRFNNRKRNDRWIAPSLEHKKSIHIQAILRICKVMPVTDITLEMGNFDTQVLKAREEGKPLPQGVDYQHGERYGITTLREAVFARDGYTCQCCGRAIKDGAILHVHHIVYRSQGGTNRMSNLITVCDKCHTPANHKQGGKLYNWKPKIASFKGATYMTTIRWKLYNEVEALFPDIDIDITYGAETKERRRALDIDKSHVNDAFVMGQFHPKHRSKPICYKKKRRNNRCLEKFYDAKYIDSRDGKNRSGQELFNGRISRNHKKDSENLHQYRLQKVTPGRRAIRRQHYPIQPHDIIVYNGNKIEVSGCQHKGTRIVFSKTKKSVQISKIKLFKYAGGYSKSVFNE

SEQ ID NO: 19679 - protein, 449 aa, Allochromatium sp.; identical to SEQ ID NO: 6788

SEQ ID NO: 19680 - protein, 447 aa, unidentified
VAVLSKTGIRLMPTSSYRARKLLAKKKAVICGYRPFTIRLTERETGDVQPVELAVDTGYFHVGNSLKTAKHELAAVEIRTLMDEKQRYDDGPRYRRMRRSRLRYRAPRFDNRRRPEGWLAPSIQGRMEQNLAFLRRVLSVVPVTRIVMEMGQFDTQVLKAVEEGRPLPEEADYQQGERYGIATLREAVFTRDNYTCQCCEKTVHDGGILHVHHIVYRSQGGTNRMGNLITVCEKCHTPKNHKPGGKLYKWKPTVKSFKGATFMTAVRWIVYRSVKKSFPDVDVRITYGAKTKLQRRTLDITKSHVNDAYVMGDFHPKHRVRPVILQKKRRNNRILEKFYDAKYIDTRDGSKKTGQQLFNGRTNRNHNTDTKNLRLYRGMKLSKGKRAIRTTRYRIQPHDILVSQGQEMEASGCHCKGTRVMTTAKKSLPIGKVRIKRYSGGYYAVAE

SEQ ID NO: 19681 - protein, 427 aa, unidentified; identical to SEQ ID NO: 14123

SEQ ID NO: 19682 - protein, 503 aa, unidentified
MDTIYVLNRDGRPLMPMHSWGRVQRFLKSGRASVVSSLPFTIRLKKQIEDPELDRCILGIDPGRTNIGLCVTDGKGKPLFASVLETRNKEIPDLMRDRKQARQASRRGERKRRQRRAIHFDKSGETAMTEYWRVLPGTKKAVCQKHIRGQESKFMHRRRPKGWRTPTAEQLYRTHLNAVAKIEKLLPIADIVIEMNRFDFAKMENPGIRNWEYQRGRLFGFKNVQEAVIARQNGKCLLCGRPIEHVHHVRPRSQGGSDHIDNLAGLCCACHQKVHTDPAAKARLASEAKKRLKKYGALSVINQIMPALLDELAYRYLLWITTGWETAKTRRGCGLPEKEKDDGTHYIDAWCIAVSIMENRLYVPDSRDLDDVFHLMRQFRRHDRQKVEATKARSYYLDGRLVAKNRRRRTGQADGKDPKPALSEWRQGHEKDVARLTVRKSTRSYNDLKRVLPGAEVLCDEKRYVVKGKHNDRWIALDAADHTLEKAQSRFTLLHHNTGIVFV

SEQ ID NO: 19683 - protein, 426 aa, Methanosarcina sp.
MLVFVINQNKKPLMPCKPSKARKLLQAGKAKVVRNTPFTIKLLFRSSGYTQPVTAGMDTGSKVVGCAAIANGKVLYQSEIYLRENVSKKMEQRKMYRRSRRSRKTRYRPARFDNRGNSKKEGRLAPSIRSKLEAHFREKRFVESLLPVTEWKVELASFDIHKITNPEVSGIGYQEGDLKGFYNIKAYVLDRDGYTCQHCRGKSKDSRLHCHHIVFRSQKGTDAPENLIMLCETCHKALHNGEFKLSGKKSKTKHATEVGIIKSQIRKSGWNFAETFGYETKYRREQVLKLLKTHYFDAVAICCRDDQKVEVEESVFLKRNVSKGDYQQRTGKRSEKKIPTGKLFNLRKFDLVKTSKGIGFVKGKRSSGFFAISDMFGNKISDSVNVKKICERLRARTSTLIQQSRTGKFTHSSPELKTQGFPAEGL

SEQ ID NO: 19684 - protein, 460 aa, Lactobacillus sp.; identical to SEQ ID NO: 12498

SEQ ID NO: 19685 - protein, 425 aa, Aphanothece sp.; identical to SEQ ID NO: 7871

SEQ ID NO: 19686 - protein, 317 aa, unidentified
VKKIQKFLPISDVVLEVNKFAFMQLDNPNIQKWQYQQGPLYQKGSLENAVSEMQEHHCLFCEKPIEHYHHVVPKSENGSNTIANIVGLCTEHHNLVHKDATWQKKLAKEKVGLVKKYSALSVLNQIIPALTKEMNSLFPKHFFVTNGKSTYDYRTAHGVSKDHWLDAYCIACSVLPNDVCDSNINSHVPYELKQFRRHDRRVLHKANMSRVYTLNGKTVATNRHKAIKQTTDSLEEFRQSHPGDVCKLKVKEHHPAYRNLNRNYPGSVFLVDGQVHVMQGVSGSHNGKADGYYNTNGNAYPYYKCKFVVKNEGIVFA

SEQ ID NO: 19687 - protein, 335 aa, unidentified; identical to SEQ ID NO: 9848

SEQ ID NO: 19688 - protein, 408 aa, unidentified; identical to SEQ ID NO: 14634

SEQ ID NO: 19689 - protein, 456 aa, unidentified; identical to SEQ ID NO: 7925

SEQ ID NO: 19690 - protein, 512 aa, unidentified; identical to SEQ ID NO: 19583

SEQ ID NO: 19691 - protein, 425 aa, unidentified; identical to SEQ ID NO: 8847

SEQ ID NO: 19692 - protein, 470 aa, unidentified; identical to SEQ ID NO: 2825

SEQ ID NO: 19693 - protein, 424 aa, unidentified; identical to SEQ ID NO: 8578

SEQ ID NO: 19694 - protein, 447 aa, unidentified; identical to SEQ ID NO: 3915

SEQ ID NO: 19695 - protein, 557 aa, unidentified
MIYNLVSTRERSFMKQKKQKVMVYILNKKGKPLMPTTRCGHVRKLLNSKKAVVVNSNPFTIRLKYDTPNGVQDVFAGIDSGRENIGSGVSNEDGDCLYLGELRTSNKSIKMKMTERVGFRRERRKHDRQNKQRKARKDHTEIQNGKDDICRATISCKSVQISYPTAEESVTHKIIRGKEGKFANRHRDGDWITPSARQLVQMHMNDLKSICKILPISHVTLERVAFDFQKLENENIKAWEYGKGKLYGYDSPEEYIHDVQDGKCLVCGKPHIDYLHHIIPRSKGGSDKVSNIAGLCYDCHYGPMGVHNCQNTQDRLPELKSEANKQYKVSLLNSVMPVLIEEMDKFCKANSIMFSICEGHDTAKVRDMYDLQKDHCIDGFAISLVDRNVKSVDVMPDRIYQKQRYKKKSKNIIQKRNCREYYDDKKLVAVNRHKGTDQKADSLEEYMNTYAETHTTDECKKHFDSLVVKPARRTYTFHKEWRICPFHIGDKVRYEKKNKIKGNTKVDTFICEGIRFVKDENKAEVKHNKTKSKKMKFCRVLESGCTPYVDYRKLALM

SEQ ID NO: 19696 - protein, 431 aa, unidentified
MPNKVYVINKHGRPLMPCSPAKARHLLDAGKAKVKKRTPFTIQLVYGSSGYTQEVILGVDAGSKTIGMSASTKKEEVFAADVTPRNDVVDLMSTRREFRRARRNRKTRYRKPRFDNRVRSKHKEWLAPSVEVKIQEHITAIRRVCGILPVSKVVVETAEFDLQLLKAIADGKPVPQGEDYQKGEMYGHYNVRQYVLWRDDYTCQCCGAHATKKKEVRLHVHHLESRKVGGDAPDNQVTLCESCHEKLHKGLIAEKDFKKRKRRSTRDATFMGIMRKTLMQRLCSELPIPVVKTRGYITKATREKLLVLPKSHTNDALAIAQGKRGFNVGYLPEIAQIDKIYTIRPVRHHNRQLHKAAILKGGIRKSNQAGKYVFGYRLFDKVQFNGQDCFIWGRRTTGIFTIKTINGKMIKDGISFKKLKPVEKSTSYLIA

SEQ ID NO: 19697 - protein, 435 aa, unidentified; identical to SEQ ID NO: 4695

SEQ ID NO: 19698 - protein, 442 aa, unidentified
MSTTVFVLDKKHRPLMPCRPARARRLLRAGRARVVKRFPFVIRLVDRTVEQSEVQPVLIKLDPGSRETGAAVVRDDGKKRHHALAFFVIEHRGGAIRDALKARSAFRRRRRSQNLRCRSPRFLNRVKPKGWLPPSLRHRVETTLSFVRRMCRYLPVSGIATELVKFDSQKLQNPEVSGVEYQQGTLFEYEVREYLLEKFGRKCIYCGAEGVPLNIDHVVPRAKGGSNRVSNLVLACMSCNQKKGARSLEDFLKGKPKVLARVRRELKTPLRDAAAVNATRWVLFNELKATGLPVETGSGALTKLNRHAFGVEKEHWLDALCVGRLNGVVTRKGLNVLEIRCMGRGSRQRTRLTKYGFPRGYLMRQKCVHGFATGDMVEANVPKGKKAGLWRGRVAVRVSGSFNIQTPKGVIQGVGWKHCRLISHNDGYGYAWLGHAPHSSPA

SEQ ID NO: 19699 - protein, 447 aa, Scytonema sp.; identical to SEQ ID NO: 2680

SEQ ID NO: 19700 - protein, 422 aa, unidentified
MFVYIINKDGKPLMPCRPQKARKLLKAGKAVVVKYEPFTLKLKFGSSGYKQPVTLGLDTGSVHIGASASTKKQELYASETILRSADGKNSIVNLLAKRRELRRSRRNRKTRYRKARFQNRTHRKKKGWLAPSIEQKIVSHLALVERLHRILPIQQIVVEVAQFDIQKIKNPDISGKGYQQGEQSGWKNVREYVLFRDQHTCQCCKGKSGDPVLNVHHIESRKTGGNAPNNLITLCKTCHQRYHQGKITLPKSIHRGMRFKDAAFMGIMRWTFYRRLREQYEDVHLTYGYQTKDTRIAHHLKKTHTTDAYCIAGNMQAKRTDTEYLRKQVRRHNRKIHREVPAKGNIRRRAQAGHLVKGFVRNDTVRAKGELWFIRGLRTKGSFVLKHLDGTKLEITPSKIQFVAHNHAYLVERREVAFLSAL

SEQ ID NO: 19701 - protein, 338 aa, unidentified
VKKILDTRRTYRRGRRTRKTRYRKPRFNNRTRVEGWLPPSIQSRLDNTFRWIDRFVSLVPHPTLTIEVGKFDAQKMMNPDIKGEEYQQGQTLSYHDVRYFVFARDKYTCQVCKKSKDKIFNTHHIIYRSHGGSDRADNLITVCTDCHTHENHQRGKVFWRWMVEGKKLPSYKEGAFMNIFRKRVFGKYPQAKITYGSITTPRRKELGLEKSHKNDAIAISGIEKIDKVVDYSFKIKQFRKKKRSLHEATARKGRKTKNTTSKRNVKNIKQLNGFYLNDRVKIYGKLGYITGFTGTSMAYVKDIVGNYITKPNKSYKQINLKECEFLNHNNNWQYVENF

SEQ ID NO: 19702 - protein, 411 aa, unidentified; identical to SEQ ID NO: 2867

SEQ ID NO: 19703 - protein, 426 aa, unidentified
LSKDINSAKGERNLRVYVLNMRGEPLMPTTPRKARILLRDGKAKVVKRTPFTIQLKYATGENKQEITLGVDAGSKTIGLSASTEDEELYSAEVQIRNDIVNLLSTRRENRRTRRNRLRYRPARFDNRKKGNGWIAPSIQNKVNAHLSTVANVYKILPVSKTIVEVAAFDIQKIKNPDVEGTGYQKGEQLGFWNVREYVLFRDGHKCQYCKGRSKDPILNVHHIESRKTGGNSPSNLITLCETCHKAYHTGKIQLKIKRGKSFRDAAFMGIMRWAFYNKLKELYQNVSLTYGYITKNTRIRNGLPKEHRIDALCIAGHPQAKISDTWYAIKKTRRHNRQIHKANILKGGKKRLNQAPYEVFGFRLFDKVLYDGKECFVFGRRSSGYFDLRKLDGTRVHTSASYKKLRLLEKSNGQIIERRMAISPLP

SEQ ID NO: 19704 - protein, 250 aa, unidentified
KGEMYGHYNVRQYVLWRDDYTCQCCGAHATKKKEVRLHVHHLESRKVGGNAPGNLVTLCDRCHEKLHKGLITEKDLKKRKHRSTRDATFMGIMRKTLMQRLCSELPIPVAETRGYITKATREKLLVLPKSHTNDALAIAQGKHGFNVGYLPGIEQIDKIYTIRPVRHHNRQLHKATILKGGIRKSNQAEKYVFGYRLFDKAQFNGQDCFIWGRRTSGYFVVKTIDGKVIHNSASFKKLRLVERASNYLIA

SEQ ID NO: 19705 - protein, 426 aa, Scytonema sp.; identical to SEQ ID NO: 2715

SEQ ID NO: 19706 - protein, 428 aa, Enterococcus sp.; identical to SEQ ID NO: 4335

SEQ ID NO: 19707 - protein, 414 aa, unidentified
MPCSPAKARLLLKEKKAIVVRRTPFTIQLTIATGETKQPVSLGVDAGYKHVGLSASTEKAELYASEVELRQDITDLLSARRALRQSRRNRKTRYRAPRFDNRIRTKRKGWLAPSVENRIDAHLSRIEAVLRLLPVTKITVETASFDLQLLKNPDISGKEYQEGEQLGFWNIREYVLCRDGHVCQHCYGRSKDPVLNVHHLESRRTGGDSPGNLITLCETCHKALHRGEITLKAKRGQSFRAEAFMGIMRSEVLNRLKASHPELEVNNTYGYRTKHARIANDIAKSHCADAFCIAGNLGAERLGEFFFQKQTRRNNRQIHKLSILKGGIRKCNQAPFEVNGFRLFDKVACKGEEGFIFGRRSSGFFDVRKLDGTRISAGISCKKLHLLEKRRTYLTEIRKEEALPPLPEGRGLRA

SEQ ID NO: 19708 - protein, 499 aa, unidentified
MRYVYVLDVDGKPLMPTCRFGKVRRMLKSGQAKAVDTLPFTIQLTYKPRTRILQPVTLGQDPGRTNIGMAAVRFDGKELGRFHCITRNKEIPKLMADRMAARKASRRGERLARKRLARKLHTTAKHLNGRILPGCSEPIAVKDIINTESRFNNRLRPEGWLTPTATQLLRTHINLFRKLSGILPVTDVAVELNKFAFMQLDNPEMKKREIDFCHGPLCGTGGLEAAVKEQQDGKCLLCGKESIGHYHHIVPRSRRGSNTIANIAGLCPKCHELVHKDADTAESLTEMKTGLMKKYGGTSVLNQIIPKLVETLADLFPGHFHVTNGWNTKEFREKHHLEKDHDVDAYCIACSHLKPEETLVETEPFEILQFRKHNRAIIHHQTERTYKLDGVTVAKNRKKRMEQKTDSLEDWYVDMAKEHGKTQADAMRSRLTVIKSTRYYNTPGRMMPGTVFLYEGKRYVMTGQITNGKYYRAYGQEKRNFPAVKVRILTKNTGLVFVA

SEQ ID NO: 19709 - protein, 428 aa, unidentified
MSFVFVVDTHRHPLDPIHPGRARLLLKEGKAAVLKRYPFTIVIKTAPEQPQLHPLRLKLDPGSKATGIALLDDQSGQVLFAAELSHRGAAIKKALDDRRAVRRSRRARQTRYRKPRFDNRKRAKGWLAPSLESRVFNVLTWVGRLRALCPITVISMELVRFDLQQMEHPEIAGVQYQQGTLAGYELREYLLEKWERTCSYCGKKGVPLQVEHIHPRAKGGTDRVSNLCLACEPCNIAKGTLDIAVFLAKKPDLLKKIQARAKAPLKDAAAVNSSRWALFERLKVMGLPIECGSGGRTKFNRTTRGLPKTHWLDAACVGASTPPLLQVGQVKPLLTLATGHGRRQMCLSDRYGFPRTSAKQAKKVKGFQTGDIVRAVVTKGKKRGTYTGRVAVRVTGSFNITTSQGTVQGIGSQYCQMLHQSDGYRYTA

SEQ ID NO: 19710 - protein, 420 aa, unidentified; identical to SEQ ID NO: 8060

SEQ ID NO: 19711 - protein, 379 aa, Arthrospira sp.; identical to SEQ ID NO: 2727

SEQ ID NO: 19712 - protein, 406 aa, unidentified; identical to SEQ ID NO: 10802

SEQ ID NO: 19713 - protein, 412 aa, unidentified
  source 1..412: note = Lachnospiraceae bacterium UBA2727
MVYVLSKTGQPLMPTENHAKVRILLKQGKAKVVHRCPFTIQLLYSSTNYTQKVTLGVDSGIKHIGLSATTKDKVLFESDVELRNDIVDLLSTRRELRRSRRSRKLRYRKPRFNNRRRSDRWLAPSVKQKVDSHITMIAKVHKILPISNIVVEVASFDIQKIKDPTISGTDYQQGEQLGFWNVREYVLFRDGHKCQCCKGKSKDKILNVHHIESRKTGGDAPNNLITLCETCHTGYHKGTVKLPKALHRGMSFKDATFMGIMRWALYGKLKAIYPDVKLTYGYITKNTRIKNGLPKDHYIDARCISGNPNAVSNGDVYYYKKVRCHNRRIHKNTILKCGYRKCNQAPYEVMGFRLFDKVQWKGQKCFIFGRRATGRMDLRLLDGTHINASVGYKTLKLLKMRSSYLVEQRKVG

SEQ ID NO: 19714 - protein, 451 aa, unidentified; identical to SEQ ID NO: 5203

SEQ ID NO: 19715 - protein, 512 aa, unidentified
MSTVYVLNKDGKPLMPTTRCGHVRHLLKEQKARVVTSKPFTIQLLYETNDVVQPLYLGIDPGRTNIGVAVVRTDGTAVFTAHLETRNREIPKLMKKRKDSRRTRRTNGRRCRRQRRAKANGTISKKCVKQATAQNGSVSKRAKEIGVIKRHLPGCEKEVLCIGIKNKEAKFNNRARPEGWLTPTANQLLQTHVNLVKKIQKLLPISDVVLEVNKFAFMQLDNPNIQKWQYQQGPLYQKASLEEAVSEMQEHHCLFCKKPIGHYHHVVPQHKNGSNTISNIVGLCTKHHDLVHKKTAWQEKLAKKKTGLNKKYGALSVLNQIIPALTKELSSLFPKHFFATNGKSTYDYRAAHAVSKDHWLDAYCIACSVLPNDVCDSDINNRVPYEFKQFRRHDRRALHKENMSRVYTLNGKKVATNRHKAVEQTTDSLEEFRQRQPDDVCKLKVKEHHPEYRNPKRNFPGCVFLVGKRTHVMQGTSGSHNGKADGYYDTNGNSYSSGKCKFVAKNKGIVFT

SEQ ID NO: 19716 - protein, 505 aa, unidentified
LYIKMTSCTCTVFPACNYAKASSSQGKHNLLLRQERLIVKEVAYMSTVYVLNKDGKPLMPTTRCGHVRHLLKEQKARVVTSKPFTIQLLYEADDLVQSLYLGIDPGRTNIGVAVVKADGTAVFTAHLETRNKEIPKLMKKRKESRRARRTNGRRCRRQRRAKANGTISKKCVKHDTAQNGSVSKRAKEIGVIKRHLPGCEKDVLCIGIKNKEAKFSNRTRPEGWLTPTANQLLQTHINLVKKIQKFLPISDVVLEINKFAFMRLDNPNVQKWQYQQGPLYQKANLEETVSEMQEHHCLFCKKKIDHYHHVVPQSENGSDTIGNIVGLCTKHHDLIHKDTAWQKKLAKKKTGLNKKYGALSVLNQIIPALTKELSSLFPKHFFVTNGKSTYDYRAAHGVSKDHWLDAYCIACSVLPNDTCDKTINSRVPYELKQFRRHDRRALNNENMSRVYTFNGKMVATNRHKATEQTTDSLEEFRQRQPNDVCNLKVKEHHPTYRNMNRNYPG

SEQ ID NO: 19717 - protein, 477 aa, unidentified
MQKNKTVFVIGMNRRGLMPCTPRKARVLLEEKKAKVARRTPFTIRLLYKTGCATQLITLGVDTGSQHIGIAIVSDDTVLSKSEYELRSTMEKRKLMETRKQYRKGRRYRKTRYRHPKFRFHTKRTYVEKPIKRNGHLTHWKKEKISCMSNRQAGWLPPSVQSKCDHHIRIINRYIEALPPSTRVVIEIGRFDMAHMLNPAIHGEEYQHGPLYEYENKKAYLLNLYDYKCPICGKGFGSKRVDGTPVKARMHHVLYRSKGSSDNVIVLIPVCDHCHTAEAHQEGGMLDKLRKIAEKQRLGICGLRDATMMNIVAKRLKAAFPNAYYTYGNITHADREVMHLEKSHANDAVAIAEHLDIRFFGNYTINDCDYTTLYKQARKKKRSLHEANPRKGRKQPNREAKRNAKNTKRVKNVCLLDKVVYQNSIGVVTGFSGLRCRAVKADGSYLGANAKYKQPILPVGQVAVLHHNNSWLEMRQI

SEQ ID NO: 19718 - protein, 265 aa, unidentified
MPNKVYVINKHGRPLMPCSPAKARHLLDEGKAKIKKRTPFTIQLVYGSSGYTQEVILGVDAGSKTIGMSTSTKKEEVFAVDVTPRNDVVDLMSTRREFRRARRNRKTRYRKPRFDNRVRSKHKEWLAPSVEVKIQEHITAIKMVCRILPVSKVVIETAEFDLQLLKAIEEGKPVPQGEDYQQGEMYGHYNVRQYVLWRDDYTCQCCGAHATKKKEVRLHVHHLESRKVGGDAPDNQVTLCESCHEKLHKGLITAKDFKKRKRRST

SEQ ID NO: 19719 - protein, 434 aa, Anoxybacillus sp.; identical to SEQ ID NO: 5674

SEQ ID NO: 19720 - protein, 407 aa, unidentified
MKVYVRNQDGAPLMPCKEAKARKLLRAGKARVVAQVPFTIQLAWQCEGQVQDVTVGIDKGSSVTGIGCVSNGEVLLAAEIHHRRDVSEKLDTRRAHRRSRRLRKWYRPARFANRGSSTRSGRLPPSIKTNVEEVIRVVRQLPLPISQIVVEDVQVDIARLNDPTLAGSRYQDPTRLDENLRIACLMRDRYTCQHCEKRNCRLEAHHIVYQEHGGKDTLTNLLTLCEACHSGVHQGRITLNVTGVSGHLDQVAQRTMQGKAHLYATLRSSVPLTTVFGYETAAFRKSMGLAKSHTTDALCVATLVNGEVVAPECPNTYRITFRPRQTRRQFYDLPRKGQGRVRYQVNEELAGFRKGDIVRVKERWVKQINSIYSNGYVAFKRVPGEPAIARPRDCRLLERGRTVVWMH

SEQ ID NO: 19721 - protein, 458 aa, Lactobacillus sp.; identical to SEQ ID NO: 6016

SEQ ID NO: 19722 - protein, 512 aa, Halomonas sp.; identical to SEQ ID NO: 13002

SEQ ID NO: 19723 - protein, 433 aa, unidentified; identical to SEQ ID NO: 16206

SEQ ID NO: 19724 - protein, 456 aa, unidentified; identical to SEQ ID NO: 3342
  REGION 1..456: note = IscB polypeptide

SEQ ID NO: 19725 - protein, 447 aa, unidentified
VPAYRIKHITKKEVPYMVYVLDIDGQPLMPTSRHRKVRKLLNNHLAKVAKRCPFTIQLLYQSTKETQPVSLGVDAGSRHIGLTATTEQKVVYQEELVPRNDVVKLLSARRALRSSRRSRKTRYRKPRFNNRVHSKHKVWLAPSVEVKIQEHITAIKRICQILPISDIHVETAEFDLQRLKAMEEGRPLPVGTDYQLGEQYDFYNTRQYVLHRDEYTCQCCGTHDNNVKLHVHHIESRQTGGDVPNNLITLCEHCHKLLHAGKTIIPKGKKRGKSYRDATFMGIMRKTLLERLKKEIDVPVEGTYGYITKYWRERAGLEKSHIHDAVCISKYPYAKTLDIYYLTKTVRHHNRQIHKSNFSKGGIRKRNQAPYLVKGFRLFDKVLYQGKSYFIFGRRATGFFDIRTLNGAKVNKGSISYKKLRIQDTANAYLKEIKAIPHMNKFTCVLA

SEQ ID NO: 19726 - protein, 406 aa, unidentified
MVYVQDIDGKPMMPTTRHGKVRRLLKDSKAVVVNTCPFTIKLMYKTSGYKQEIVLGVDAGTKHVGLSATTKSKELYSSEVILRSDIVELLSTRRESRRTRRNRLRYRKPRFNNRIKSKRTGWVAPSVRHRIDAHIRVIDNICSILPVSRIIVEVAQFDTQKIKNPDISGDEYQEGDQLGFWNVREYILARDGHKCQHCKGKSKDPILNVHHIESRKTGGDSPSNLITLCETCHKEFHKGNIKLKVSRGKSLRDAAVMGIMKWKLYEELKSRCDNVSMTFGYITKHNRIKYGIEKSHTSDAFVISRNFNAKRIERQYLKRLIRRHNRQIHKMKILKGGKKKNNQAPFEIFRFRLFDKVLYNNEILFVYGRRKSGNFNIRDFNGENPKDVSHKKLKLIRGKRHLIILK

SEQ ID NO: 19727 - protein, 465 aa, unidentified; identical to SEQ ID NO: 3603

SEQ ID NO: 19728 - protein, 415 aa, unidentified
MIYVRSKKGKALMPSERGGRIGYLLRHGKAHVVSRVPFVVQLDYESTTYTQEVSLGIDAGSKHIGVSASSEKKELLAAQVELRNDVVNLLSTRRELRRTRRNRKTRYRKVRFDNRKRKDGWLAPSIELKVESHLKVIRLVHKLLPITKTTIEVAQFDAQKIKNPDIKGEEYQQGEQMGFWNVREYVLARDGHRCIHCKGKSRDPILNVHHLESRKTGGNSPSNLVTLCETCHKAYHRGEFELKIKRGSSLRDAAVMNIMRWAVYERAKEEFGNVNLTYGYITKHTRIENGIAKTHAADAFCIAKNVHAMRLSSFFMCRCVPRHTRALHVANPKKGGIRRSCIASHKIGKSRFQRFDMVRWMGKECFIFGSTNGKPVLRDIKGIKMHENASVNIKTIKFLRRLRNNILMEEKTSES

SEQ ID NO: 19729 - protein, 431 aa, unidentified
MPNKVYIINKHGRPLMPCSPAKARHLLDEGKAKVKKRTPFTIQLIYGSSGYTQEVILGVDAGSKTIGMSVSTTKEELLSAEVKPRNDVVDLLSTRREFRRARRNRKTRYRKPRFDNRVRSKHRGWLAPSVEVKIQEHITSIKRVCRILPVSKVVVETAEFDLQLLKAIADGKPVPQGEDYQQGEMYGHYNVRQYVLWRDGYTCKCCGAHTTKKKEVRLHVHHLESRKVGGDAPDNQVTLCESCHEKLHKGLIAEKDFKKRKRKSTRDATFMGIMRKTLMQRLCSELPIPVIETRGYITKATREKLLVLPKSHTNDALAIAQGKQGFNVGYLPGIVQIDKICTIRPVRHHNRQLHKATILKGGIRKSNQTEKYVFGYCLFDKVQFNGQDCFIWGRRTTGIFTIKTINGKMIKDGISFKKLKLVEKSTSYLIA

SEQ ID NO: 19730 - protein, 340 aa, unidentified
MAVFVLDKKKQPLMPCSEKRARLLLQRGRAVVHKRYPFTIRLKNRVGGEAQPLRLGIDPGSKTTGLALMHEPDSQQRHVLCLFELIHRGFQIKKALQQRAAFRRRRRSANLRYRAPRFNNRIKPKGWLAPSLQHRVDTVMAWVNRLSRLAPVTAISQELVRFDTQKLENPEISGVEYQQGTLLGYEVREYLLEKWGRECAYCGTTDTPLEIEHVVPRSRGGSNRVSNLTLSCHPCNAEKDSQTLTDFFATNKGLKKRLKANGLSADAQLERVQRQLKQPMRDASAVNATRWALFSALKTTDLPVAVSSGGRTKYNRQRLNIPKTHALDAACVGAFGKLYD

SEQ ID NO: 19731 - protein, 413 aa, unidentified; identical to SEQ ID NO: 11242

SEQ ID NO: 19732 - protein, 408 aa, unidentified; identical to SEQ ID NO: 4826

SEQ ID NO: 19733 - protein, 518 aa, unidentified
MANLKLIDELLEKTEYIYVLGIDGKPQMPTNRKVRVRSLFKSGMAKVVDTVPFTMQLLYENKPVLQPITIAEDPGRTNIGAAVLTQFGDLVFSAVVETRNKSIKKLMSDRKAHRQASRHGERKARQRLAKKYKSMIKAGMIMRKLPQYAADKFVTCKVIKNTEARFCNRKRMPDWLTPTVNHLVQTHINLIKKVEKYLPITDVAIEVNRFAFMQMENPDASGVDFQNGPLKGFDDVKAAIREQQHGKCLMCKNDIEHFHHIIPRSKGGSNTIQNQVGLCKKCHAKVHTDAEFQAKLKDKKEGLIKKYGALSALNQAVPFICKELLKIYGAEHVHFCTGKDTSLIRSSLGYDKTKDNQMHEVDAYCICLAAIGADKTKRPDFNNVFKIKQFRRQDRSIINYQRERTYYLDGKKIATNRKPRFEQKGDALSDWYSEQVKLKGKKYADKLTGRITVKKSTRGYNSKDRVMPGTIFYYGGKRLVLSGQTTRGKYYKAYGDPKTNYPAAKCQIYKHNEGLAFV

SEQ ID NO: 19734 - protein, 412 aa, unidentified; identical to SEQ ID NO: 5980

SEQ ID NO: 19735 - protein, 457 aa, unidentified; identical to SEQ ID NO: 4299

SEQ ID NO: 19736 - protein, 415 aa, unidentified; identical to SEQ ID NO: 3370

SEQ ID NO: 19737 - protein, 458 aa, Acidithiobacillus sp.; identical to SEQ ID NO: 13713

SEQ ID NO: 19738 - protein, 420 aa, unidentified
MQYVYVLNKHGEPLMPCSPGKARLLLKQQKACVVKRTPFTIKLLFGSAGYKQPITLGVDAGSKHVGLSASTEKRELYSEEFTPRSDVVELLSTRRQNRRSRRNRKTRYRVPRFDNRVHNKHKGCLAPSVEVKIQEHITVIKHICKILPISLVRVETAEFDTQRLKAMLAGKPLPVGTDYQLGEMYDEYNVRQYVLKRDHYTCQCCGTHNTAKKVVKLHVHHLESRKTGGNAPSNLVTLCTTCHKNLHKGRVTIDGKERGKPLRDAAFMGIMRKTLMVRLKEELPIPVQGTYGYITKMRREQNDIKKSHTNDARCIGKHPLAEPCSVCYRTKAIRHHNRQTHKANFSKKGIRKRSQMPYLVEGFRLWDKVLYKGQECFVSGRRSSGSFALKKLDGTSISKGVTFKKLRLLEPATNYLIERM

SEQ ID NO: 19739 - protein, 472 aa, unidentified
VEQGMAVFVLDRQGRPLMPCSEKRARLLLARGRARVHHLVPFVVRLIDRSVNDADFQPLRLKLDPGSKTTGLALVRDSEVVDAATGEVARDAAVLSLIELVHRGRQISESLTARRNMRRRRRGNLRYRAPRFLNRTQPKGWLAPSLQHRVNTSMAWVERLQRWAPIAAFSCELVRFDMQALQNPEICGLQYQQGTLFGYEVREYLLEKWGRKCCYCDVQGVPLNIEHLLARARGGSNRITNLALACVPCNTQKGAQPIENFVIDKTRLARILAQTKRPLRDAAAVNSTRWALANALKETGLPLELASGGRTKFNRSHLGIPKTHSLDAACVGDVNAVHSWTKPTLVIKCTGRGSYQRTRLTKHGFARGYLMRSKRVQGFATGDFVRAKVPSGKKVGTHQGRVAVRASGSFNIQTHSLVIQGISYRHCTVLQRADGYGYSWIASIEGEAGTGAARRPALSLPGLKAEVSRATE

SEQ ID NO: 19740 - protein, 414 aa, unidentified
MPCSPAKARLLLKEKKAIVVRRTPFTIQLTIATGETKQPVSLGVDAGYKHVGLSASTEKAELYASEVELRQDITDLLSARRALRQSRRNRKTRYRAPRFDNRISTKRKGWLAPSVENRINAHLSRIEAVLRLLPVTKITVETASFDTQLLKNPDIAGKEYQEGEQLGFWNIREYVLCRDGHVCQHCYGRSKDPVLNVHHLESRRTGGDSPGNLITLCETCHKALHRGEITLKPKRGQSFRAEAFMGIMRWEVLNRLKASHPELEVNNTYGYRTKHARIANDIAKSHCADAFCIAGNLGAERLGEFFFQKQTRRNNRQIHKLSILKGGIRKRNQAPFEVKGFRLFDKVVCKGEEGFIFGRRSSGFFDVRKLDGTRISAGISCKKLHLLEKRRTYLTEIRKEEALPPLPEGRGLRA

SEQ ID NO: 19741 - protein, 324 aa, unidentified
ISGELKFRKDISEKLAERRRYRRNRRNKLRYRQPRYSNRKRTETLSPSVNQKLQTFLDFVNMVKRILPISSICVEVSGFDTQKMQNAEISGTEYQHGELQGYEVREYLVEKYHRTCAYCGKTNVPLQVEHIVPKSRGGSDRVSNLTLSCQKCNQKKGNMTADEFGYPNVQNKAKQSLKAPAFMNTIRWLLVDLLHSDYTYGYNTKHNRIKLGLEKSHINDAFVIADGTNHERVRPYLGIQTRRNNRALQTNRNGFKPSIRKQRYPLGPKDLVFLKFGSLICTVKAVFNYGKWVRVVDAIGNIINVNIKNVELIKYGKGVQLQFV

SEQ ID NO: 19742 - protein, 465 aa, Nocardiopsis sp.
VRGETTHISPDVGGVTSQPLAGERPRERHPSVFVLDKHHAPLQPCHPARARKLLNKGRAVVARHTPFTIRLKDRTIAESEVDGVEIGVDPGSKHTGIAVFTQQAGERCGRYGIQLDHRGARVRKKMGQRSAYRRRRRTANLRYRAPRFFNRTRPQGWLPPSLKHRVETTTGWVDRLARWAPVKAVHVERVAFDTHALSAGRPLEGAEYQRGTLHGFEVREYLLAKFDRACVYCGATNTPLNLDHVHPRSRSGSDRVSNLVLACVPCNQAKGDRPVEEFVTDKLALARILARSKAPLRDAAAVQSTRWALWRALDQRLPTHVGSGGRTKWNRTRNHLPKSHTLDALAVGKVDTITQTTNRVLIAGCAGRGSYARTRPDKHGFPRLRLPRTKGFFGFTTGDLVRAVVPQGKKTGTHTGRVAVRASGNFNITTTHGTVQGIRHKHVRLLQRADGYGYTWKGEGVSSRP

SEQ ID NO: 19743 - protein, 461 aa, unidentified
MPNPIQVCVLDKQKKPLMPCHPARARELLREGRAVVHRRVPFTIRLKDRVGGDVQPVRLCEDPGSKKTGIAVVRETPAAETSLDANGDDVSGPTRTVLFKIELEHRGAAIHKAMESRKSLRHGRRSRKTRYREQRYNNRASSRRSGRLPPSLKHRVETTMTWTRRLSRLVPVTAISVERVRFDTQLMENPEISGVQYQQGTLRGYETREYVLEKWGRSCAYCDAENVPLQLDHVRPKSRGGPSRPTDFVPACGLCNQRKGAQPVETFLKRDPKRLAKIMAGLKAPMRDAAAVNATRWALDAELRTIGVPVEAASGGRTKWNRHRFDVPKTHANDAVCVGRVGGVAMLDRPTLYVRCTGRGSYCRTRVTASGFPRGYLMRSKSSHGFRTGDIVRAVVPSGKKRGTHTGRVAVRATGNFAVFTSGGRVDGISHRHCRVVQRADGYDYAWTEKKRAEKSEAATL

SEQ ID NO: 19744 - protein, 434 aa, Escherichia sp.; identical to SEQ ID NO: 5780

SEQ ID NO: 19745 - protein, 402 aa, unidentified
MVTVQQSTHHLPFGRVFIRRNLFMVYVISQDGKPLMPCSDPIARLLLKQGKAKVKKREPFTIKLTYETTNYTQGLTLGVDTGSGTIGTAVSKDNGDIVYMSEVVVRNDITDKMTQRAKYRRNRRNRKTRYRKARWLNRASSIKKDRFSPTMQSKLHSHVREIEYIQSILPVTEMVFETGQFDMQLMKNPSLANPKVRPWGYQKGANYGFENTKAMVLNRDNYTCQCCKGKHKDSKLEVHHIVFRSQGGSDEESNLLTLCHTCHKDLHSGKINPKLSGKLKGNLKYATQMNSIRKQLFRFYPNAIETFGYVTKANRLHLGVDKEHYYDACTIATQGNAFNVKSNLYKKKCVSDGDFQKTKGIRSEQPIVTDKICGFRKFDKVRYFGNDYFIKGRMSTGYAILM

SEQ ID NO: 19746 - protein, 512 aa, unidentified
MSTVYVLNKDGKPLMPTTRCGHVRHLLKEQKARVVTSKPFTIQLLYETDDVVQPLYLGIDPGRTNIGVAVVKADGTAVFTAHLETRNREIPKLMKKRKDSRRTRRTNGRRCRRQRRAKANGTISKKCVKQDTAQNGSVSKRAKKIGVIKRHLPGCEKEVLCIGIKNKEAKFSNRVRPEGWLTPTANQLLQTHINLVKKIQKFLPISDVVLEVNKFAFMQLDNPNIQKWQYQQGPLYQKANLEEAVSEMQEHHCLFCKKPIAHYHHVVPQSENGSDTIGNIVGLCTKHHDLVHKDTEWQKKLAKKKTGLNKKYGALSVLNQIIPALTKELSSLFPKHFFATNGKSTYDYRAAHGVSKDHWLDAYCIACSVLADDVCDNNINSHVPYELKQFRRHDRRALHKENMSRVYTLNGKSVATNRHKATEQTTDSLEEFRQRQPNDVCKLKVKEHHPEYRNPKRNFPGCVFLVGKHTHVMQGTSGSHNGKADGYYDTNGNSYSSGECKFVAKNGGIVFA

SEQ ID NO: 19747 - protein, 411 aa, unidentified; identical to SEQ ID NO: 3277

SEQ ID NO: 19748 - protein, 427 aa, Eubacterium sp.; identical to SEQ ID NO: 3021

SEQ ID NO: 19749 - protein, 413 aa, Blautia sp.; identical to SEQ ID NO: 3616

SEQ ID NO: 19750 - protein, 262 aa, unidentified
LTIATGEAKQPVSLGIDAGYKHVGLSASTEKAELYASEVELRQDITDLLSARRALRQSRRNRKTRYRAPRFDNRIRTKRKGWLAPSVENRINAHLSRIETVIRLLPVTKISVETTSFDMQLLKNSDIAGKEYQESEQLGFWNVREYVLFRDGHVCQHCHGRSKDPVLNVHHLESRRTGGDSPGNLITLCETCHKELHRGEITLKAKRGQSFRAETFMGIMRWEVLDRLKASHPKLEVQNTYGYWTKHARMLSASPAILAPKG

SEQ ID NO: 19751 - protein, 452 aa, Lactobacillus sp.; identical to SEQ ID NO: 19430

SEQ ID NO: 19752 - protein, 470 aa, unidentified
LSIKPLINIGEGVIYSSICTGLSLQTYQKRKEVPYMVYVLDIDGQPLMPTTRHGKVRRLLNNHLAKVVKRCPFTIQLLYQSTKETQPVSLGVDAGSKHIGMAATTEKKVVYQEELSPRNDVVKLLSARRTLRRTRRNRKTRYRKPRFNNRAHSKHKGWLAPSVEVKIQEHITAIKRICQILPISEIHVETAEFDLQRLKAMDEGSPLPVGIDYQLGEQYDFYNTRQYVLHRDGYTCQCCGTHDNNIKLHVHHIESRQTGGDAPNNLIILCEHCHKALHEGKLELPKGKKRGKSYRDATFMGVMRKTLLERLKKEIDVPVEGTYGYITKYWRERAGLEKSHIHDAVCISKYPYAKPLDTYYLTKAVRHHNRQIHKSNFSKGGIRKRNQAPYLVKGFRLFDKVLYQGKSYFIFGRRATGYFDIRTLDGTKINKGSIGYRKLRIQDTAKAYLTETKKEARAIPHMNEFTCVLA

SEQ ID NO: 19753 - protein, 395 aa, Moorena sp.
MQNYVFVIDTNKQPLNPISPKKARRLLNKGKAAVFRMYPFTIILKTAVDNPTISPCQIKIDPGSKVTGFALVQNNQVIWGMELEHRGGLIKKKLESRKTVRRGRRNRHIRYRKPRFLNRKRSEGWLPPSLEHRILTIETWVKRLIKFCPVNEVWVERVKFDTQKMQNPEINGIEYQQGELAGYEVREYLLEKWGRECTYCGKQSVPLQIEHIHPKSFGGSNRVSNLCLACEKCNQRKGNKLIEEFLKKKPNLLHKIKTKAKQPLPDAAAVNATRNKLVKVLKRIKPIVTGTGAQTKYNRTKLGFPKEHWIDAACVGNIETLTLKISQPLLVTCKGQGGRQKAALNKYGYPIRHNPLKPIKGWCSGDIAKNILTGEFGRVNPRSKSNSFNYTVPGK

SEQ ID NO: 19754 - protein, 451 aa, unidentified; identical to SEQ ID NO: 5203

SEQ ID NO: 19755 - protein, 478 aa, Pantoea sp.
VAVFVLDIHGKALMPCTEKRARLLLDRGRARVHRLLPMVVRLVDRQADDCEFQPLRLKIDPGSKTTGLALVREVAAVDALTGEVQLGVAVLNLLELVHRGRQISEAMTARRQMRRRRRSNLRYRAPRFLNRGGDRTGWLAPSLQHRVDTTMTWVRRIQRWAPVRAISSELVRFDMQALQNPEIDGIEYQQGTLFGYELREYLLEKWGRQCAYCGARNLPLQIEHIRARAYGGSNRASNLTLACACCNQKKAARSIEDFLAQDQKRLNAILAQAQKPLRDAAAVNTTRWALANALQATGLPVELASGGRTKFNRSALGVPKTHALDAACVGQVHSIENWNSPTLALKAMGRGSYQRTRLDKFGFPRGYLMRSKRVHDFATGDMVRADVPKGLKAGVHTGRVAIRATGRFNIQLHQAGVSAVVQGIHYRHCRIVQRNDGYGYFLNPANHTKRDQVRPKASDASHPALYLPGMNAEVSRAL

SEQ ID NO: 19756 - protein, 476 aa, unidentified
LEAVGAEDVSHPGLPGKYKHKGGQLMSVAVISKTGERLMPTSEYRARKLLKSGKAIKHSYHPFTIQLTERKTGNIQPIELCMDTGYIHIGISVKSEKHEYLAEQIDTLTDERGRHDACRMYRRQRRSRKRYRQARFNNRKRDQGWIAPSLEHKKKIHIQAISRINKVMPITDITIEMGNFDTQVLKAKEEGKPLPQGAEYQHGERYGIATLREAVFARDGYKCQCCGRTIKDGAILHVHHIKYRSQGGTNSMSNLATVCDKCHTPKNHKPGGKLYNWKPKLPSFKGATFMTTIRWQLYSEVKALFSDIDIYIAYGAATKERRRELNIDKSHINDAFVMGQFHPRHRIKAVLYKKKRRNNRCLEKFYDAKYIDSRDGKKRSGQELFNGRINRNHKKDSENLHQYRLQKVTAGKRTVRKQHYSVQPHDIIIYESRKRETTGCHCNGARVMLLPDKKSVSIKKIKIYRYAGGYFKSTFN

SEQ ID NO: 19757 - protein, 421 aa, unidentified
MVYVLDITGQPLMPTDRHGKVKHLLKDGKAKVVKRCPFTIQLLYTTTTYTQEITLGVDAGSKVIGLSASTPRKELYSSEVTLRNDIVKLLSLRREYRRSRRNRTTRYRAARFNNRVHSKNKGWLAPSIENKINTHIKVVADIHKILPISKIVVETASFDIQKIKNPNISGEEYQQGEQLDFWNVRQYVLFRDNYTCQCCKGKSKDNRLAVHHIESRQTGGNAPNNLITLCITCHEKYHKGKIKLPNTIKRDKIFKDAVFMGIMRWAFYERLKNIYPNIRMTYGYITKNTRIQHNLPKTHYTDALCISGNPLAKPLEVLYIQKAIRTRNRQIHKATISKGGIRKLNQAPKYVFGFQLYDKVLYKGKECFIFGRRSSGSFDIRTLDGTKISPGVSHKKLKLLEKRKTILTERVFKNQEGGKQG

SEQ ID NO: 19758 - protein, 427 aa, unidentified
MFVYVISKDGQPLMPTERFGKVRRLLKENKAKVVRSCPFTIKLLYEPETKAVQEVTLGQDTGSKYVGTACISNDKILYQSEVTLRNNIKKKMDSRRGFRRNRRNRKTRHRKPRFLNRANSTKKDRLPPSVRSMVQSHVDEIEFCKKILPISKIILEVSQFDTALVKNSNLINEKVKHWGYRKGFNYSYSSRREAVLHRDNYTCQCCGKKHVRLEVHHIIFRSQGGTDDENNLITLCKECHDAIHNGTLILTKKPRRLNLKYATQMSIIRSQLLKLYPEAIETFGFVTKENRNNLNLQKEHYIDACVIASGGKEFKQLDWTFKKRRVPRQNRQLCKGIRGEKKIPTGKMFGFRRYDKVKYLNEICFVKGRRSRGVFVLMDIDNKTIDFRDRGGRLNVSYKLLERLNTRRSVLCIGQISLNCDKGVKRC

SEQ ID NO: 19759 - protein, 428 aa, unidentified
LKVFVLNMRGRPLMPCSPARARHLLKAGKAVVRRRTPFTIQLRIATGETKQSVTLGVDAGAKHVGLSAATEKEEVFASEVELRQDITGLLAARLSLRRDRRHRKTRYRAPRFLNRVRSKHKGWLAPSVENRIQAHMSRIDAVCRLLPVTKIVIETASFDIQKIKDPSVEGTDYQQGDQLGFWNVREYVLFRDGHVCQHCHGHAKDKILNVHHLESRQTGGDAPNNLITLCETCHKACHAGKIKLKVKRGQSFRAEAFMGIMRWTLLDRVRKAHPGLPVENTYGYLTKNTRITLGLPKAHCVDAYCIAGNLKAVRRGVCLHQRQVRKHNRQIHKCTVLSKTLKDGTKIGYRKLNQTPHLVKSFRLFDKVRCLGQTGFIFGRRSSGYFDVRRLDGVKLSSGISYRKLTLLEKRSTYLTELRKEDGASSPV

SEQ ID NO: 19760 - protein, 512 aa, unidentified; identical to SEQ ID NO: 2792

SEQ ID NO: 19761 - protein, 407 aa, unidentified
MPDKVYVISRLGHPLMPCSPAKARHLLDDKKAKVVKRMPFTIRLLYGSTKYIQPIILGVDAGSKTIGLSASTAKEEVFAAEVMPRNDVVENLSTRREFRRARRNRTTRYRKPRSDNRVRSNHERWLAPSVKVKIQEHITSIKRVRTILPISKVVIETAEFDLQLLKAIQEGKPIPEGEDYQKGEMYGSYNVCQYVLWRDNYTCICCGVRGTPKNPVRLHVHHFESRKYGGNAPDNHGTLCDDCHKKFHLGIITDVKLKTRRRQSTRDAAFMGIMRKTLMWRLRTELFIPVAETKGYITKATREKLLVLPKSHTRDALAIAQGRHGFGIKEYAYVEPANHIYTVRPVRHHNRQLHKASILKGGIRKRNQALSISLVSDSTIRFSIREKRVSCGGGEQAEPFFFEQLTV

SEQ ID NO: 19762 - protein, 465 aa, unidentified
  source 1..465: note = Clostridia bacterium
MNTCVCVLSNSGERLMPTFRLGKVRRLLKDGKAKIVKHHPFTIQLLYDSKTNTQPIEICEDVGYNYIGISVKSESHEYVSAQYDTLQDEKEHHDDCRMHRRTRRNRLRYRKPRFDNRKRGEGWLAPSLKHKKELNVNVVKMYCTVMPITHATVEVGSFDTMLVKAIQEGKVIPEGADYQKGPRYNLATLREAVFYRDNYVCKICGRKATEGAILHMHHMFYWKGRHGNSLNELLTVCEKCHTPANHQKSGKLYGFGEKIKFADLSGAAFMNTVRWQIVNELYVAFGKPFVTITYGAMTKEKRIALQLEKSHNNDAYAMGEFHPNLRCMFEHYEKARRNNRILEKFYDSRYIDIRTGEIATGKELFNGRINRNHKKDSENLHKYRGKRTYAGHRALLRKKVNLNPGDLVSLNGENLIVHSTHTKKNGAVNVEFETPAKSGQKSASLKKLKIVKAANSIHPAWKKIS

SEQ ID NO: 19763 - protein, 456 aa, unidentified; identical to SEQ ID NO: 10734

SEQ ID NO: 19764 - protein, 411 aa, unidentified; identical to SEQ ID NO: 5658

SEQ ID NO: 19765 - protein, 426 aa, unidentified; identical to SEQ ID NO: 6377

SEQ ID NO: 19766 - protein, 413 aa, unidentified; identical to SEQ ID NO: 3295

SEQ ID NO: 19767 - protein, 417 aa, unidentified
MPCSPAKARLLLKERKAIVKRRTPFTIQLTIATGEAKQPVALGVDSGYKHIGLSATTEKAELYASEVELRQDITDLLSARLALRRSRRSRKTRYRAPRFDNRVASKREGRLAPSVENRIAAHMSRVEAVMRVLPVTAITVETAVFDTQLLKNPDITGAAYQQGEQLGFWNVREYVLFRDGHVCQHCRGKSKDPILNVHHIESRRTGGHAPNNLITLCETCHKAFHRGEIKLKVKRGKSFKAKTFMGIMRWTLFERLKKAHPELNVHNTYGYLTKHKRISYGIAKSHCADAYCIADNLSAKRLKGFFFQKQTRKHNRQIHKLSILKGGLRKKNQAPYELKGFRLFDKVICKGEEAFIFGRRTSGSFDVRRLDGTRISAGINYKKLRLLEPRTTYLTEFRKEAALPPLHKCRGFRAEFL

SEQ ID NO: 19768 - protein, 451 aa, unidentified; identical to SEQ ID NO: 2436

SEQ ID NO: 19769 - protein, 458 aa, unidentified
LMPTSEREARLLLKHGKASVYRKVPFTIKLNYKTGSTTQPGYLGIDTGSQHIGVSVVREDGTVLHKEEIGLRDSMSKRKLMESRSSLRRGRRHRKTRYRHPKWRLKAKRVYYETPDRKGRHWKKQKITFASKRPQGWLPPSLQSKTDHHIQWIKKLQDLLPDGYRLSIELGRFDPARMKDTEIHGDLYQKGPQYDYENVRAYVLDRDRYTCQVCGKKGGKLHIHHILYRSHGATDNPQYMATICSDCHSTENHQPGGILYQWMQEQKKFTRGLRDATFMNILRKRLMKAFPKATFTYGNITKADREKLKIPKSHGNDATAIAIVKTGIMTVKDNEPVIYIQQVRRKKRSLHEETPRKGRKEPNRKASRYNKNTKAVTVTKRKNKKRISITGCLFDRVELNGKKGWISGFTDKSCYIKDENDQYIRISPKYKQVSLSKLKILHHCGNWVIGARRSLGKG

SEQ ID NO: 19770 - protein, 455 aa, unidentified
MVFVLDRHHKPLMPCHPARARRLLGKGRARIHKLYPFTIRLVDRELKDSTVQPVVLKLDPGSKETGMALVREDETKTHHALYFVNLKHRGSEIKQSLLQRSSFRRSRRSRNLHYRAPRFLNRTRPQGWLAPSLQHRVDTTLSWVERLRKLAPVATLEMELVKFDTQKMQNPEIDGVAYQQGELAGFEVREYLLEKFGRKCIYCGAEGVPLNIDHIVPKSAGGSNRVSNLVLACVDCNQKKNNLPFEVFLKGDKAKINRIRSQLKTPLKDAASVNTTRWQLFEALKLTGQPLTTATGARTKYNRHQFGVPKEHWLDALCVGETAAVRGWQPLGVLVVKCTGRGAYKRTRLTKDGFPRGYLTRTKRFFGFGTGDMVVATVFASKKKGSYKGRVAVRKSGSFAIQTASRKVDGISYRYCRLLSRADGYGYSWHSSKSLINSTKETALLPRINTQVSAP

SEQ ID NO: 19771 - protein, 442 aa, unidentified; identical to SEQ ID NO: 19369

SEQ ID NO: 19772 - protein, 452 aa, unidentified
MSMQTLQREFKNVPTDASLVRSSTNLSLNRLETVSEGDTVLSCNNPEVNLRKQVSGLTVIVPVLSLEGSPLMSCTPAKARHLLEKRRAYVVKLNPFIIRLNFKCENKIQEINIGVDAGYKNIGYSAITNTKEILSNEIILDDKTKSRMNERKMYRRNRRYRLRYRKSRFNNRVKPDGWLPPSIKRKFDAHINFINGLKKILPIKKVTVEIGNFDIQKIENPDISGFQYQQGDLYGYYNLKFYLLEREKGKCQLCGKKFTKEDRPHMHHIKQRSEGGTSRAEGIALIHKSCHKNLHDKKLFHKLKPARVYKAETFMSIVGGMFKKFLDCDVTYGYKTCAKRKELGLEKSHVNDAFVIAGGTVQKRCLSGKIEQKRINNRTLQTNRKGFIPSIRRSRHRIQNRDFIWIGDKKYLSGGVACRGSQVYYFDGDVKKLISSKRVEKVYSTDSLVWLN

SEQ ID NO: 19773 - protein, 512 aa, unidentified; identical to SEQ ID NO: 17848

SEQ ID NO: 19774 - protein, 465 aa, unidentified; identical to SEQ ID NO: 8068

SEQ ID NO: 19775 - protein, 424 aa, unidentified
MRVFVFNMRGRPLMPCPQRKARLLLRENKAMIYKYHPFTIQLTYTTGETKQDCHIGIDTGSKYIGAAVRSEDKVFWKGEIELRQDIRSNLDTKRIYRRSRRNRKTRYRKPRFLNRKRRDEWLPPSLQSRINHTFHWIDTLSSLVPNPILHIEVGKFDVAKMINPEIHGVDYQHGQTYGFFDERYFVFARDNYTCQCCGKSKNKILNTHHIIYRSNGGTNRVDNLITVCTDCHTSQNHRKGGIFYQWQEQHKKVKQYKEPPFMNTLRKRIFVAYPDAEITYGSETTPKRKAMKLDKAHYNDAIVISGINEIKENPEEWLLIKQFRKKKRSLHEATARKGRKKPNRNQTRNSKNTPYYKGFYLNDKVSVFGKSGYITGFTSNAAYIKDENNDYITLPNKTYKQVSINKMKLECHNNNWQYIIKNAV

SEQ ID NO: 19776 - protein, 411 aa, unidentified; identical to SEQ ID NO: 6901

SEQ ID NO: 19777 - protein, 422 aa, Sutterella sp.; identical to SEQ ID NO: 3542

SEQ ID NO: 19778 - protein, 535 aa, unidentified; identical to SEQ ID NO: 6116

SEQ ID NO: 19779 - protein, 422 aa, unidentified; identical to SEQ ID NO: 7063

SEQ ID NO: 19780 - protein, 425 aa, unidentified; identical to SEQ ID NO: 13706
  REGION 1..425: note = IscB polypeptide

SEQ ID NO: 19781 - protein, 420 aa, unidentified
MQYVYVLHKHGEPLMPCSPGKARLLLKQQKACVVKRTPFTIKLLYGSVGYKQPITLGVDAGSKHVGLSASTEKRELYSEEFTPRNDVVELLSTRRQNRRSRRNRKTRYRAPRFDNRVHSKHKGWLAPSVEVKIQEHITVIKRICRILPITLVRVETAEFDTQRLKAMLAGKPLPVGTDYQLGEMYDEYNVRQYVLKLDNYTCQCCGAHPTTKKPVKLHVHHLESRKVGGNAPSNLITLCTACHDNLHKGKVTLDGKERGKTLRDAAFMGIMRKTLMARLKERLPIPVQGTYGYITKMRREQNDIKKSHVNDARCISKHPLAEPCSVCYRTKAIRHHNRQTHKVNFSKGGFRKRSQMPYIVKDYRLWDKVLYKGQECFVSSRRASGSFALKKLDGTSISKGVTFKKLWLLEPATNYLIERM

SEQ ID NO: 19782 - protein, 459 aa, unidentified; identical to SEQ ID NO: 16178

SEQ ID NO: 19783 - protein, 435 aa, Fervidicola sp.
LLVFVLNKHGKPLMPCKPSKARKLLKQGKAKVVKKEPFTIQLLYGSSGYKQKCIVGIDAGSKNIGIAVTTEDGRVIYKAQVELRQDIKENIETRRRLRRARRNRKTRYRKPRFLNRRRPEGWLPPSIRARVEAHYNLIKKLAQIIPITEIRVEVTQFDVQAILNPNIHGEEYQKGRMHGFDSVKEYVKIRDGFKCHYAKLRPDIPCSGKLTVDHIIPRSKGGADNPSNLVCCCEAHNTAKGHMNYEQFTGQQPPKIEDFRPVAFMNVLKDYLVPMLQKIASTGYIFGLYTRRTRREWGLGKSHIDDAMAIAGIKPRWQDNVWYYIKQVRKKKRSLHEEIPRKGRKEPNKEAKRNSKNTKEIAINGKKWCLWDKVYISDIDKTGFISGFTNNWVYIQDIYGNYLQLSDKYKQINPKKLQLMYRNNNYICERFISTL

SEQ ID NO: 19784 - protein, 552 aa, Streptomyces sp.
MTTFPAGEQTHQAVLPQQPALEPVRADTPGSRDETAHGHPVTARGTGREHGRGETDGTGTEACRRHAKRAATVAQAAENGSGDAPTHTPEYAGGSGAGRVFVLSGDGHPLMPCHPARTRELLRKGRAVVVRQTPFTIRLKDRTLAESAVDGLQLRIDPGSKGTGLALTDEKKETDTDGRVVTVRRGLFSIELQHRGDQIHHTMGQRAGYRTRRRSANCRYRAPRSNNRGVAQGWLPPSLRHRVDTTFSLANRLCRFAPITEIHLERTAFDTHSMSAGRRLHGTEHAQGPLAGSTTRSYLHARWNSACAYCDAVGVPLNIDHVRPRSQGGSNRITNLVLACVPCNKAKGNSSVESFLAHRPDRLAKILGQLKTPLRDAAAMNSAQERLTEALETLGRPVHAWPGHLTMANRVTTGLGKTHTLDALSVGHLDHEGGAAIVRFPDRVLVAKATGRGSYARTTPDKYGFPRLRRSRTKQHFGYVTGDLVRAVIPSGKWAGTWAGRISVRARGQHSLTTPRGRVNVSHWNLQLLQRGDGYGYSTRPEAPLQASPKNS

SEQ ID NO: 19785 - protein, 434 aa, unidentified; identical to SEQ ID NO: 5659

SEQ ID NO: 19786 - protein, 427 aa, Nostoc sp.; identical to SEQ ID NO: 2670

SEQ ID NO: 19787 - protein, 480 aa, unidentified; identical to SEQ ID NO: 2726

SEQ ID NO: 19788 - protein, 404 aa, unidentified
VGYNYIGISVKSESHEYVSAQYDTLQDEKEHHDDCRKYRRTRRNRLRYRKPRFDNRKRSEGWLAPSLEHKKQLNIRLIERYVSVIPITRATVEVGSFDTMLLQAIQKGESKPEGVDYQKGPRYNLATLREAVFYRDNYTCQVCGRKIADGAILHMHHMFYWKGRHGYQLDELVTACEKCHTPANHQKGGKLFGFGEDKEFANLSGAAFMNTVRWQIVNELYAAFGKNFVTVTYGAMTKEKRIALHLEKSHNNDAYAMGNCHPAHRCEFGHYEKVKRNNRILEKFYDSQYIDTRTGELTNGKSLFNGRISRSHKKDSENLHKYRGKRICKGHRALRRKKLALNPGDLVSLNGEILVVHGTHTKKNGSVNVEFKTPSRGGKKSASLKKLKIVKTSNLMHSAWTKVA

SEQ ID NO: 19789 - protein, 412 aa, unidentified; identical to SEQ ID NO: 3155

SEQ ID NO: 19790 - protein, 462 aa, unidentified; identical to SEQ ID NO: 4520

SEQ ID NO: 19791 - protein, 570 aa, Streptomyces sp.; identical to SEQ ID NO: 3191

SEQ ID NO: 19792 - protein, 456 aa, unidentified; identical to SEQ ID NO: 11534

SEQ ID NO: 19793 - protein, 451 aa, unidentified; identical to SEQ ID NO: 3061

SEQ ID NO: 19794 - protein, 408 aa, unidentified; identical to SEQ ID NO: 3192

SEQ ID NO: 19795 - protein, 480 aa, unidentified
VFPLWEINFIWRIILKMQRVFVLDKNKKPLMPCTSARARFLLSKKEAAIFKHYPFTIILKKKTNNIKQNIAYKADQGSKITGIALVAEFKKSKTVIFAANLEHKGYQVSEKLESRAASRRSRRSRKTRYRKPKWTNTMSKKQLAHINQKQKGWLAPSIWSRINNITNLCFKLNKLSPISTIALENVRFDTQLMENPDIQGKEYQQGTLFEKEVKEYLLYQFNHKCGYCNGLSKDPLLEKEHIVPRSKKGSNRLSNLAIACRTCNEDKNNLLPQDWLLKLKKSKSKINKERFKRFEKISKGLKPSLRDAALMNIIRYKLVEELSQFSLPIELGSGGLTKFNRTNQNYPKDHWIDASCIGKSGEKIIIPSRLTPLNIKAIGRGSRQMCRVDKYGFPRTKPKKKGDCFGFKTGDLVRAIVTKGKKEGIYIGRLAVRESGNFNISTKNGVVQGISYRYCRLLQRNDGYNYSNHINKITTGGKQG

SEQ ID NO: 19796 - protein, 406 aa, Geobacillus sp.; identical to SEQ ID NO: 3747

SEQ ID NO: 19797 - protein, 502 aa, unidentified; identical to SEQ ID NO: 6341

SEQ ID NO: 19798 - protein, 438 aa, Lactobacillus sp.; identical to SEQ ID NO: 4646

SEQ ID NO: 19799 - protein, 460 aa, unidentified
MPLLPVSERKARLLLDDGKASVYRKVPFTIKLNYKTGSTTQPGNLGIDTGSQHIGVSVVREGGTVLHKEEIGLRDSMTKRKLLEAKASLRRGRRYRKTRYRHPKWRSKTKRVYCEVPDKKRRHWKKQKSTFTSGRPEGWLPPSLQSKTDHHIRWIKKLQNLLPEGYRLSIELGRFDPARMKDPEIHGNLYQKGPQYDYENVRAYVLDRDRYTCQVCRRKGGKLHVHHILYRSQGASDTPQYMATVCSSCHTTENHLPGGILYQWMQEQKKFTRGLREATFMNILRKRLMKTFPDAVFTYGNITKVDREKLKLPKNHGNDATAIALVRTGVTSVKDEEPVLYIQQVRRKKRSLHEETPRKGRKEPNRTAARNSKNTKAVTVTKRRGGKKVSVTACLFDRVELNGKKGWITGFTGKACRIVDTEGNYVAATDKYTQVNISSIRILHHTGNWVTGLKRNVGKR

SEQ ID NO: 19800 - protein, 466 aa, unidentified
MSTCACVLSKNGERLMPTIRLGKVRHLLKDGKAKIIKHHPFTIQLLYDSETNIQPIEICEDVGYNYIGISVKSESHEYVSVQYDTLQDEKDCHDSCRKMRRIRRDRLRYRKPRFDNRKRNKDWLAPSLEHKKELNVNVIKMYCEVVPITHVTVEVGSFDTMLVKAIQEGKAIPEGADYQKGPRYNLATLREAVFYRDNYTCKVCGRKAKNDSAILHVHHMFYWKGRHGNSLNELLTVCEKCHTPANHQKGSKLYGFGENIKFANLSGAAFMNTVRWQVVNELYAAFGKLFVTFTYGAMTKEKRIALHLEKCHNNDAYAMGNFHPVDRCAFEHYKKVKRNNRILEKFHDSQYIDTRTGELTNGKSLFNGRISRSHKKDSENLHKYRGKRICKGHRALRRKKVALNPGDLVSLNGEILVVHSTHAGKNGYVGVEFKTPSKSGKKSASLKKLKIVKTSNSMHSAWTKVS

SEQ ID NO: 19801 - protein, 295 aa, unidentified
MHYSPSGERTACFGIAVIPKKGESAMQYVYVVGSNGKPLMPCSPTKARKLLKSKSAAVLQRTPFTIKLLHHAGGYKQPITLGVDAGSKHVGLSACTDTEELYKEELTPRNDVVKLLSARRECRRGRRHRKTRYRAPRFNNRVHSKHKGWLAPSVEVKIQEHITAIHRICRRLPITKIVVETAEFDTQRLKAMLEGKPLPVGIDYKRGEMYDEYNVRQYVLKRDNYTCQHCGARGSAEKGIKLHVHHLETRQTGGNAPNNLITLCKDCHTAWMAFRLSRRVESSAIRKRIRLKRPV

SEQ ID NO: 19802 - protein, 438 aa, unidentified
MRVFVLNKNRQPLDPCKPARARILLRTGKAKVLRRYPLTIILTEEVSEPITHNHQLKIDPGAKITGLAIVQSNRIIWGAELTHRGFQIRDSLTKRRTLRRSRRNRKTRYRQPRFLNRKRSSGWLPPSLMSRIQNILTWVKKLTQLCPITGISQELVRFDTQKLENPEISGVEYQQGTLFGYEIREYLLEKWHRKCAYCGATDTQLEIEHIVPKSKGGSNRVSNLAISCHSCNQAKSNQEIEQFLSRKPNVLQRILSQAKKPLADAAAVNATRWKLYNELKLTELPVEVVSGGLTKFNRCSQNLPKTHWLDAACVGISTPERLIIKEVKKPLIVIATGHGSRQMCRTDKYGFPVRYVPRFKFIKGYQTGDIVKAIVTKGKKQGVYVGRVAVRTTGSFNIKTKNGLVQGISHKYCQHIHKKDGYAYVYGSKTSPFKAQYF

SEQ ID NO: 19803 - protein, 427 aa, Lachnospira sp.; identical to SEQ ID NO: 12418

SEQ ID NO: 19804 - protein, 478 aa, Pantoea sp.
VAVFVLDIHGKALMPCTEKRARLLLDRGRARVHRLLPMVVRLVDRQAGDCEFQPLRLKIDPGSKTTGLALVREVAAVDALTGEVQLGVAVLNLLELVHRGRQISEAMTARRQMRRRRRSNLRYRAPRFLNRGGDKTGRLAPSLQHRVDTTMTWVRRIQRWAPVRAISSELVRFDMQALQNPEIDGIEYQQGTLFGYELREYLLEKWGRQCAYCGARNLPLQIEHIRAKAHGGSNRASNLTLACACCNQKKAARSIEDFLSQDHKRLNAILAQAQKPLRDAAAVNATRWALANALQATGLPVELASGGRTKFNRSALGVPKTHALDAACVGQVHSIENWNSPTLALKAMGRGSYQRTRLDKFGFPRGYLMRSKRVHDFATGDMVRADVPKGLKAGVHTGRVAIRATGRFNIQLHQAGVSAVVQGIHYRHCRIVQRNDGYGYFLNPANHTKRDQVRPKASDASHPALYLPGMNAEVSRAL

SEQ ID NO: 19805 - protein, 512 aa, unidentified
MSTVYVLNKDGKPLMPTTRGGHVRHLLKEQKARVVRTKPFTIQLLYETDDVVQPLYLGIDPGRTNIGVAVVKADSTAVFTAHLETRNEEIPKLMQGRKKARRARRTNGRRCRRQRRAKANGTISKKCVKQTTAQNGSASKRAKEIGVIKRHLPGCEKELLCIGIKNKETKFSNRTRPEGWLTPTANQLLQTHINLVKKIQKFLPISDVVLEINKFAFMQLDNPNIQKWQYQQGPLYQKASLEEAVSEMQEHHCLFCKKPIAHYHHVVPQSENGSNTIGNIVGLCTKHHDLVHKDATWQKKLAKKKTGLNKKYGALSVLNQIIPALTKELSSLFPKRFFATNGKSTYDYRAAHGVSKDHWLDAYCIACSVLPNDTCDRTINSRVPYELKQFRRHDRRALHKENMSRVYTLNGKSVATNRHKATEQTTDSLEEFRQRQPNDVCKLKVKEHHPTYRNMNRNYPGSVFLIGKQVHVMQGIAGSKDGEATTYKDTNANSIAAGKCKFVAKNSGILFV

SEQ ID NO: 19806 - protein, 521 aa, Streptomyces sp.; identical to SEQ ID NO: 18896

SEQ ID NO: 19807 - protein, 423 aa, Anoxybacillus sp.
VLDTNKRPLAPCHEAVARKLLKQGKAAIYRRFPFTIILKKSVDESEIKATYRLKIDYGSRHTGLAILRGQEVVWLGQLDHRTDIKERIDKRRAFRRARRNRKTRYRKPRFLNRKRKEGWLPSSLESRVQNIQTWVNRLKKLCPIGYISYENAKFDTQLMRNPEINGVEYQQGTLQGYEVREYLLEKFGRKCCYCGKENVPLEVEHIIPKSRGGTDRVDNLCLACHDCNQRKGSKTAEEFGYPHIQKQVKESLKDASAINSTRWKAYEVLKQTGLDVECGTGARTKMNRIRLDLPKTHYFDACCVGESTTNHLYFKTKEVLFIKAKGRGSRSRTNLDRYGFPRGYLARQKFFFVFQTGDMVKAVVPRGKYQGVWFGEVACRKTGSFDIKGKDGKRIAQGINYRYVQVIQRFDGYTYRREGMNIA

SEQ ID NO: 19808 - protein, 442 aa, unidentified; identical to SEQ ID NO: 2903

SEQ ID NO: 19809 - protein, 371 aa, unidentified
VDAGYKHVGLSASTEKAELYASEVELRQDVSDLLSARRALRQSRRSRNTRYRAPRFDNRIRTKRKGWLAPTVENRINVHLSRIETVLRLLPVTKITVETASFDTQLLKNPDIAGKEYQEGEQLGFWNVREYVLFRDGHVCQHCHGRSKDPVLNVHHLESRRIGGDSPGNLITLCETCHKALHRGEIKLKAKRGRSFRAETFMGIMRWGVLNRLKASHPKLEVHNTYGYRTKHARIANGIAKSHCADAFCIAGNFGAKRLGEFFFQKQTRRNNRQIHKLSILKGGIRKRNQAPFEVKGFRLFDKVACQGEEGFIFGRRSSGFFDVRKLDGTRISAGISCKKLHLLEKRRTYLTEIRKEEALPPPPEGRGLRA

SEQ ID NO: 19810 - protein, 512 aa, unidentified; identical to SEQ ID NO: 5824

SEQ ID NO: 19811 - protein, 396 aa, unidentified
VVRRTPFTIQLTIATGESKQPVSLGVDAGYKHVGLSASTDKAELYASQVELRQDITDLLSARRALRRARRNRKTRYRAPRFNNRIRTKRKGWLAPSVENRINAHLSRIEAVLRLLPVTKITVETASFDMLLLKNPDIAGKEYQEGEQLGFWNVREYVLFRDGHVCQHCYGRSKDPVLNVHHLESRRTGGDSPGNLITLCETCHEALHRGEIALKTKRGHSFRAEAFMGMMRWEVLNRLKASHSELEVNNTYGYRTKHARIVNGIDKSHCADAFCIAGNLGAERLCEFFFQKQTRRNNRQIHKLSILKGGIRKRNQAPFEIKGFRLFDKVACKGEESFIFGRRSSGYFDVRKLDGTRISAGISYKKLRLLEKRRTYLTEIRKEEALPPLPEGRGLRA

SEQ ID NO: 19812 - protein, 432 aa, unidentified
MLVYVLKQNGQPFMPTERFGKVRRLLKEGKAKVVRREPFTIKLLYEPETDVVQEPYCGVDTGSKHVGVAVVGNDKVLYQSQTELRSDIKRKMDARRVSRHNRRNRKTRYRKSRFLNRRNSIKKYRLSPSVKHKVQAHIDEIEFCKKILPISDENLILEVSQFDTALMKNPGLMNEKVKHWGYQQGFNYGYSSRREAILHRDNYTCQCCGKRNCRLEVHHIKFKSNGGTDDEENLITLCEDCHKGIHVGTVTLNKKPKKSKCLKHATHMSIIRSQLLKVYPDAIETFGFVTCENRHHLKLEKDHYIDACVIASGGLEFKELDVIFYKRRVSKGDYQVARGSRGEQKIPTGKICGFRRFDKVEYLGKEYFIKGRMSSGFAGLMNIFGDEVDFGYMPRGYKTPKLSSCKKISARRSCLCIERRLHHVCYLKRGGN

SEQ ID NO: 19813 - protein, 406 aa, unidentified
MVYVQDINGKPMMPTTRHGKVRRLLKDKKAVVVNLCPFTIKLMYVISDYKQEIVLGVDAGTKHVGLSATTKSKELYSSEVILRNDIVDLLSTRRELRRARRNRLRYRKLRFNNRIKSKRPGWTAPSVKYKIDAHIRVIDNVFSILPVSRIVIEVAQFDTQKIKNPNISGKEYQEGDQLGFWNTREYVLARDGHKCQYCKGKSKDKILNVHHLESRKTGGDSPSNLITLCETCHKEYHKGNIDLKIKRGSSLRDAAVMGIMKWKLYEELRSRYDRVSMTFGYITKHNRIKYGIEKSHTSDAFVISKNINAKRIGCQYLKRLIRRHNRQIHKMKILKGGKKKNNQAPFEVFGFRLFDKVLYNNKICFVYGRRKSGSFNIRDFNGENSKDVSHKKFKLIRGKRHPIILK

SEQ ID NO: 19814 - protein, 388 aa, unidentified
LAKVITNCPFTIQLLYNSTNYTQPVSLGLDAGSKHIGVSATTETKVLYEADVTLRNDIVALLSARREARRTRRNRKTRYRKPRFNNRTRKDGWLAPSVQQKVDTHLTVVRKVLKILPISSITVETASFDIQKIKNPDIKDTDYQQGEQLGFWNVREYVLFRDGHECQCCHGRSKDPVLNIHHIESRKTGGNAPNNLITLCETCHKGYHKGTVTLPKTIHRSMQFKDAIFMGIMRWAFYNRLKELYAAEDIPVAFTYGYITKNTRIEHGLSKEHFVDARCISGHPDAIPPKEVFYQKKVRCHNRQIHKFKILKGGIRKRNQAAYEVKGFRLYDTVLWKGQKCFIFGRRLTGRMDLRLIDGTHINASVGYKNLKLLKKRSNYLIEQREVG

SEQ ID NO: 19815 - protein, 494 aa, unidentified; identical to SEQ ID NO: 5675

SEQ ID NO: 19816 - protein, 406 aa, unidentified
RLLLKEKKAIVVRRTPFTIQLTIATGESKQPVSLGVDAGYKHVGLSASTEKAELYASEVELRKDITDLLSARRALRQSRRNRKTRYRAPRFDNRIRTKRKGWLAPSVENRINAHLSRIEAVLRLLPITKITVETASFDMQRLKNPDISGKEYQEGEQLGFWNVREYVLFRDGHVCRHCHGRSKDPVLNVHHLESRRTGSDSPDNLITLCETCHKALHRGEITLKAKRGQSFRAQAFMGIMRREVLNRLKASYPELKVHETYGYLTKHARIANGIVKSHGADAFGIAGNLGAERLGEFFFQKQTRRNNRQIHKLSILKGGIRKRNQAPFEAKGFRLFDKVACQGEEGFIFGRRSSGSFDVRKLDGTRISAGISCKKLRLLEKRRTYLTEIRKEEALPPLPEGRGLRA

SEQ ID NO: 19817 - protein, 433 aa, unidentified
MVYVISKSGKPLMPTNRHGKVRILLKEKKAKVVQNKPFTIQLLYNSKEYTQPVSLGIDSGYTYIGYSAITEDTELISGEVELLSGQSERLKEKAMYRRQRRQRLRYRKPRFDNRKRAEGWLAPSIQHKLDSHIRFIEKLKKILPITNITIEVGSFDTHKLKNPSVSGEDYQNGEQEGFFNLREYIFHRDSHICQVCGSKDMALQIHHIGYWKNDRSNRPQNLMAICVSCHVPANHLEGAKLWGLKPSNKGFKEATFMSMVRWRLVNLLNCNHSYGYATKSKRIALGLDKSHSNDAFVIAGGENQVRSEKTNFKQVRRNNRSLEKFYDAKYIDIRTGKKVSGQDLFSGRRCRNKSLNTENLHKFRGKKLSKGRRSIRQNRYFFQPNDLIKLDNIVYTVRGTHNKGSRVILKETGKSIKVELLTLYKFMSGLVAV

SEQ ID NO: 19818 - protein, 431 aa, Petrotoga sp.; identical to SEQ ID NO: 11592

SEQ ID NO: 19819 - protein, 415 aa, Bacillus sp.; identical to SEQ ID NO: 5740

SEQ ID NO: 19820 - protein, 442 aa, unidentified; identical to SEQ ID NO: 2903

SEQ ID NO: 19821 - protein, 407 aa, unidentified
QPLMPTDRHRKVRLMLQSGQAKVIKRCPFTIQLTYNTGHQAQEISLGIDAGSKHIGVSATTKTRVLYEADVELRNDIVDLLSSRRELRRGRRNRKTRYRPARFDNRRREDGWLAPSIRQKIGTHLTVVENICKILPISRITVETASFDIQKIKNPDIQGAEYQQGDQLGFWNNREYVLFRDNHTCQCCKGKSKDKILNVHHIESRKTGGNAPNNLITLCEICHTGYHKGAIQLPKTVKRGMRFKDAAFMGIMRWAFYEALKQQYEPVGTPVHNTYGYITKHTRIEHNLPKEHYVDARCISGNPDAFPNGEYYYQKKVRCHNRQMHKLTILKGGIRKQNQATYLVKGYRLFDKVSYQRKEYFVFGRRKSGFFDIRTLSGKQVNKGSLSCKKLKFIATRMYYLIERRAV

SEQ ID NO: 19822 - protein, 465 aa, Marinobacter sp.; identical to SEQ ID NO: 11094

SEQ ID NO: 19823 - protein, 420 aa, unidentified; identical to SEQ ID NO: 6017

SEQ ID NO: 19824 - protein, 422 aa, unidentified
LNKRGKPLMPCSPAKARLLLKEKKAIVVRRTPFTIQLTIATGESKQPVSLGVDAGYKHVGLSASTEKAELYASEVELRKDITDLLSARRALRQSRRNRKTRYRAPRFDNRIRTKRKGWLAPSVENRINAHLSRIEAVLRLLPITKITVETASFDMQRLKNPDISGKEYQEGEQLGFWNVREYVLFRDGHVCRHCHGRSKDPVLNVHHLESRRPGSDSPDNLITLCETCHKALHRGEITLKAKRGQSFRAQAFMGIMRREVLNRLKASYPELKVHETYGYLTKNARIANGIVKSHGADAFGIAGNLGAERLGEFFFQKQTRRNNRQIHKLSILKGGIRKRNQAPFEAKGFRLFDKVACKGEESFIFGRRSSGSFDVRKLDGTRISAGISCKKLRLLEKRRTYLTEIRKEEALPPLPEGRGLRA

SEQ ID NO: 19825 - protein, 465 aa, unidentified
MSTCVCVLSNNGERLMPTIRLGRVRHLLKDGKAKIIKHHPFTIQLLYDSKTNTQPIEICEDVGYNYIGISVKSQSHEYVSAQYDTLQDEKACHDSCRKLRRTRRNRLRYRKPRFDNRKRGEGWLAPSLKHKKELNVNVVKMYCTVMPITHATVEVGSFDTMLVKAIQEGKVIPEGADYQKGPRYNLATLREAVFYRDNYVCKICGRKATEGAILHMHHMFYWKGRHGNSLNELLTVCEKCHTPANHQKSGKLYGFGEKIKFADLSGAAFMNTVRWQIVNELYVAFGKPFVTITYGAMTKEKRIALQLEKSHNNDAYAMGEFHPNLRCMFEHYEKARRNNRILEKFYDSRYIDIRTGEIATGKELFNGRINRNHKKDSENLHKYRGKRTYAGHRALLRKKVNLNPGDLVSLNGENLIVHSTHTKKNGAVNVEFETPAKSGQKSASLKKLKIVNTTDSMHSAWEKIS

SEQ ID NO: 19826 - protein, 518 aa, unidentified
LSNLKLIDALLEKTEYIYVLGIDGKPQMPTNRKVRIRSLFKSGRAKIVDTVPFTIRLLYENDAVLQSITIAEDPGRTNIGTAVLTQLGDLVFSTVVETRNKSIKKLMTDRKAHRQASRRGERKARQRLAKKHGSMIKAGMMMRKLPQYAADKFVTCKIIKNTEARFCNRKRMPDWLTPTVNHLVQTHINLIKKIEKYLPITDVAIEVNRFAFMQMENPNINGLDFQNGPLKGFDDVKAAIREQQHGKCLMCKNDIEHFHHIVPRSKGGSDTIQNQAGLCKKCHAKVHTDSEFLAKFKDKKEGLIKKYGALSALNQAVPFICKELIKIYGVEHVHFCTGKDTSLIRSSLGYEKTKENQMHEVDAYCIGLAAIGADKVKRPSFNNVFKIKQFRRQDRQRVHYQKERTYYLDGKKIATNRKPRFEQKGNALSDWYKEQIEAYGQHEAGKMRSRLTVKKSKRSYNTAKRLMPGCIFYYDGQRHVMTGQSSYGRYLRAYNCGTKDFHASKCQIIRFNTGLVFV

SEQ ID NO: 19827 - protein, 426 aa, Parasutterella sp.; identical to SEQ ID NO: 3045

SEQ ID NO: 19828 - protein, 378 aa, Moorena sp.; identical to SEQ ID NO: 2642

SEQ ID NO: 19829 - protein, 441 aa, unidentified
AGFRKERRRRDRQNKQRKARKDHTEIQNGNADICRTTISCKSVQISYPAAEKSVTHKIIRGKEGKFANRHRDEGWITPSARQLVQMHMNDLKSMCKILPISHVTLERVAFDFQKLENENIKAWEYGKGKLYGYDSPEEYIHDVQGGKCLICGKPHIDYLHHIIPRSKGGSNKVSNLAGLCYDCHYGPMGVHNCQDTQDRLPELKNEANKQYKVSLLNSVMPVLIEEMDKFCKANSIIFSICEGHDTAKVRDIYDLQKDHCVDGFAISLVGRNVKSVDVMPDRIHQKQRYKKKSKNIIKKRNCREYYDGKKLVAVNRHKGTDQKADSLEEYMNTYAETHTADECKKHFESLTVKPARRTYTFHKEGRICPFHIGDKVRYEKKNKIKGNTKVETFICEGIRFPKDENKAKVEHNKTKSKKMKFCRVLEPGCTPYIDYRKLVLI

SEQ ID NO: 19830 - protein, 466 aa, unidentified; identical to SEQ ID NO: 13091

SEQ ID NO: 19831 - protein, 473 aa, unidentified
MVAVVTSTGKPLMPTSTYRARKLLKGGRAVIYKYRPYFTIMLVDRAEGEVQDIEYKSDTGSKHAGISACTEKQELLSEQRDLLENEPEHHNDRKKNRRGRRNRKRYRKPKFDNRKKKPQEGHEKWLAPTNLHKLEIQVNLFKDFCQVVPVTSAYFEMGKFDTQVLKAVLEGRPIPQGEDYQRGEQYGTDTLRAAVFLRDDYTCRICGRTIKDGAILHVHHVGYWMQDRTNRPANLATVCEQCHTPANHGRNGILYGRKPEHGTLKDASYMTSVRWIMLKELKDAAPEVDIHVTYGVTTKRKRQGLHLPKSHVNDAFSMGRFPPKKRADTAYWKKTIRHDRSLQKFYDAVYLDTRDGREKKGSELSNGRISRNHKKDSENLHKYRGHKVSKGHVSIRRDGNKLKPGSVVLYNGERLTVHGTHTSYRKNKKGEEVKSVNVQFTRPASDGKKSASLKKCKIVTRNYNTGWKQYRPA

SEQ ID NO: 19832 - protein, 411 aa, unidentified
MVYIQDIDGKPMMPTTRHGKVRRLLKDNKAVVVNTCPFTIKLTYKTSDYKQEIVLGVDSGTKHVGLSATTKSKELYASEVILRSDVVDLLSTRRGLRRTRRSRLRYRKQRFNNRVKSKKDGWIAPSVRHKIDSHIRIISFVYSILPVSKLIVEVAQFDTQKIKNPEISGKEYQEGEQLGFWNVREYVLARDGHKCQHCKGKSKDPILNIHHIESRKIGGDSPSNLITLCETCHKEFHKGNIKLKVSRGKSLRDAAVMGIMKWKLYEELKSRYDNVSMTFGYITKYNRINHGIEKSHVSDAFVISRNFNSCRLGYYYKRKLVRRHNRQIHKMKILKGGIRKRNQAPFKVFGFKLFDKVMFQGEEHFIYARRLSGQFNIRDINGENKKDVSCKKLKYVSHGLVSVKTNLFLSQ

SEQ ID NO: 19833 - protein, 462 aa, unidentified
LVQPLYLGIDPGRTNIGVAVVKTDGTAVFTAHLETRNKEIPKLMQERKKARRARRTNGRRCRRQRRAKANGTISKKCVKQDTAQNGSVSKRAKKIGVIKRHLPGCEKEVLCIGIKNKEAKFSNRTRPEGWLTPTANQLLQTHINLVKKIQKFLPISDVVLEINKFAFMRLDNPNIQKWQYQQGPLYQKASLEEAVSEMQEHHCLFCKKPIAHYHHVVPQSENGSNTIGNIVGLCTKHHDLVHKDTAWQKKLAKKKTGLNKKYGALSVLNQIIPALTKELSSLFPKHFFATNGKSTYDYRAAHGVSKDHWLDAYCIACSVLPNDVCDSNINSRVPYELKQFRRHDRRALHKANMNRVYTLDGKKVATNRHKAIKQTTDSLEEFPQRQPDDVCKLKVKEHHPEYRNPERNFPGCVFLVGKHTHVMQGTSGSHNGQADGYYDTNGNSYSSGKCKFVAKNKGIVFA

SEQ ID NO: 19834 - protein, 431 aa, unidentified; identical to SEQ ID NO: 4463

SEQ ID NO: 19835 - protein, 470 aa, unidentified
MSVFVVGLNGCRLMPTSERKARLLLKQGKAFVEQKVPFTIRLNYKTGSTTQLGYLGIDTGSQHIGVSVVREDGTVLHKEEIGLRDSMSKRKLLEAKASLRRGRRYRKTRYRHPKWRPKTKRVYCEVPDRKGRHWQKKKITFTSKRPKGWLPPSLQSKTDHHIRWIKKLQDLLPEGYRLSIELGRFDPARMKNPEIHGDLYQKGPQYDYENVRAYVLDRDRYTCQICKKKGGKLHVHHILYRSHGATDDPQYMVTVCSDCHSAQNHLPGGILYQWMQEQKRFSRGLRDATFMNILRKRLIRAFPEAVFTYGNVTKVDREKLKLPKSHGNDATAIALVKTGITAVKDKESVICIQQVRRKKRSLHEEIPRKGRKEPNRTAARNNKNTKAVTVTKRQNKKKVSMTGCLFDRVELNGKKGWISGFTGKSCYVKDADDQYLSTSPKYKQVSLSKLRILHHCGNWIIGAKKTLGKG

SEQ ID NO: 19836 - protein, 532 aa, unidentified
MSTVYVLNKDGKPLMPTTRGGHVRHLLKEQKARVVQSNPFTIQLLYKTNDAVQPLYLGIDPGRTNIGVAVVKADGTAVFTAHLKSRNKEIPKLMQDRKRARRARRTNGRRHRRQRRAKANGTISKKCVKQTTTQNGSVSKRAKEIGIIKRHLPGCEKDVLCIGIKNKEAKFSNRTRPEGWLTPTANQLLQTHVNLVKKVQKLLPISDVVLEVNKFAFMRLDNPDIQKWQYQQGPLYKKESLESAVSEMQEHHCLFCKKPIDHYHHVVPKSENGSNTIANIVGLCAEHHNLVHKDVAWQEKLAEEKTGLNKKYGALSVLNQIIPALTNKLSVLFPKHFFVTAGKSTHDYRAAHGVSKAHWLDAYCIACSVLPSNVCDSNINNHVPYELKQFRRHDRRVLHKANMSRVYTLNGKAVATNRHKAIKQTTDSLEEFRQNYPDDVYKLKVKEHHPAYRNLNRNYPGSVFLVGKQAHVMQGIASSKDGKTTKYNDTNATTITAGKCKFVAKNSGILFVQCKFRKALSDGTTKKLQYPV

SEQ ID NO: 19837 - protein, 426 aa, Anoxybacillus sp.
MVFVLDTNKRPLAPCHEAVARKLLKQGKAAIYGRFPFTIILKKSVDESEIKATYRLKIDYGSRHTGLAILRGQEVVWLGQLDHRTDIKERIDKRRAFRRARRNRKTRYRKPRFLNRKRKEGWLPSSLESRVQNIQTWVNRLKKLCPIGYISYENAKFDTQLMRNPEINGVEYQQGTLQGYEVREYLLEKFGRKCCYCGKENVPLEVEHIIPKSRGGTDRVDNLCLACHDCNQRKGSKTAEEFGYPHIQKQVKESLKDASAINSTRWKAYEVLKQTGLDVECGTGARTKMNRIRLDLPKTHYFDACCVGESTTNHLYFKTKEVLFIKAKGRGSRSRTNLDRYGFPRGYLARQKFFFGFQTGDMVKAVVPRGKYQGVWFGEVACRKTGSFDIKGKDGKRIAQGINYRYVQVIQRFDGYAYGKGVAELA

SEQ ID NO: 19838 - protein, 423 aa, unidentified; identical to SEQ ID NO: 3951

SEQ ID NO: 19839 - protein, 414 aa, unidentified
MPCSPAKARLLLKEKKAIVVRRTPFTIQLTIATGESKQPVSLGVDAGYKHVGLSASIEKAELYASEVELRKDITDLLSARRALRRARRNRKTRYRAPRFNNRIRTKRKGWLAPSVENRINAHLSRIEAVLRLLPVTKITVETASFDMLLLKNPDIAGKEYQEGEQLGFWNVREYVLFRDGHVCQHCYGRSKDPVLNVHHLESRRTGGDSPGNLITLCETCHEALHRGEIALKTKRGHSFRAEAFMGMMRWEVLNRLKASHSELEVNNTYGYRTKHARIVNGIDKSHCADAICIAGNLGAERLCEFFFQKQTRRNNRQIHKLSILKGGIRKRNQAPFEIKGFRLFDKVACKGEESFIFGRRSSGYFDVRKLDGTRISAGISYKKLRLLEKRRTYLTEIRKEEALPPLPEGRGLRA

SEQ ID NO: 19840 - protein, 386 aa, unidentified
MTMVYVQNKDGKPLMPTTRYCYVRLLLKEKKARVVCTTPFTIRLNYDTPNITQDLILGIDPGRTNIGVAVVKEDGSCVFSAHLETRNKEVPLLMKKRAAFRRQHRTQDRRRKRQRRAIAAGTTVESNTIERLLPGYEKPIVCHHIRNKEARFNNRSRPAGWLTPTANHLLQAHINLIAKAAKFLPITKVVVELNRFAFMAMDNPNIRRWEYQQGPLYGLGSVKDAVYAQQDGHCLFCKKPIDHYHHVVPRHKGGSETLANRCGLCEKHHALVHKDKAWAEKLVTRKGGMNKKYHALSVLNQIIPHLMEYLGSETPYDVYATDGKSTKGFRIAKNVPKEHYTDAYCIACSILDADTKVSAPAEPFKLKQFRRHDRQSCIRQMVDRKY

SEQ ID NO: 19841 - protein, 452 aa, synthetic construct; identical to SEQ ID NO: 4732

SEQ ID NO: 19842 - protein, 504 aa, unidentified
MVWEAIQTRRIKPHDIGEGTLRRHAAGTVSFPALCKNRKETLMSVLVIGSNGRALMPTNPRKACLLLKKKTASVVCRHPFTIQLLYKTGCATQEGCIGIDTGSQHIGVGVTCGDRVILKEEHELRSSMEKRSLLVARAAMRRARRYRKVRYRKPKWRHHTKRMYFEKPNRRGQHWRKVKTTTQSPRPKGWLPPSLQSKCDHHFRIIDRYLKYLPDSITRNLVIEVGRFDMARMNDPMIHGEMYQRGPMYDAENLKAYIFARDGYQCACCKAKAGTTRKTDGTTVKLVAHHILFRSRGATDNPKYMVSVCDHCHTTKAHQPGGILYSWMENNKKVTRGLRDAAFMNILRQRLFARYPQAAFTYGNITAADRKQLRLPKSHANDAVAISLFGKEVSAVRDTCQTVHYKQVRKSKRSLHEAIPRKGRKNPNTKAVRNKKNTTQVNGFKLWDSVLADGKKLFICSFTGTSAYLVDKNGCYVSQPGKTYKQWPLSKLKRLHPNGNWLVT

SEQ ID NO: 19843 - protein, 404 aa, unidentified
  source 1..404: note = Clostridiaceae bacterium UBA4052
MPTNRHGKVKHLLKDGKAKVVRRTPFTIQLLYDSPEYTQPITLGVDAGSKVVGLSATTEKKELFVSEVTLRDDIPELLSTRRQNRRTRRNHLRYRMARFLNRTASKKEGWLAPSVKHKVDSHLKVIENVHRILPVSRIVIETASFDIQKIRNPEISGREYQQGEQLGFWNTREYVLWRDNHECQHCHGKSKDRVLNVHHKESRKTGGDSPGNLVTLCETCHKSHHAGRIKLNLTPNKSYRDASFMGIMRWYVYNSLKELYPEVSMTFGYITKNNRINNNIEKAHSADAYCISGNMNAKRIDEIYNQAFKRKHNRQIHKGNFLKGGKKKLNQSAYEVKGFRLFDHVRYRDKECFIFGRRTSGYFDLRKLDGSVVHRSASFKELTLLKRQNTILIERKECKGVLLS

SEQ ID NO: 19844 - protein, 238 aa, unidentified; identical to SEQ ID NO: 18050

SEQ ID NO: 19845 - protein, 410 aa, unidentified; identical to SEQ ID NO: 17269

SEQ ID NO: 19846 - protein, 515 aa, unidentified; identical to SEQ ID NO: 4456

SEQ ID NO: 19847 - protein, 473 aa, synthetic construct
MAVLVLDRRKKPLMPCTEKRARLLLARGRARVHRLVPFTIRLVDRTVEGSVLQPLRVKLGPGSRTTGIALVRESEAVEADTGEVRKAAHALVLIELTHRGHAIRDALTARRAFRRRRRGANLRHRAPRFDNRTRPDGWLAPSLQHRVDTTMTWVRRLQRWAPVTAISQELVRFDTQALQNPEISGVEYQQGTLAGYEVREYLLEKWHRTCAYCQVTNVPLQVEHIVPKARGGSNRISNLALACEDCNQEKGTREVREFLAHDPKRLARVLAQAKAPLRDAAAINATRLALFTALKATGLPVETGTGGRTKWNRTRMQIPKTHALDATCVGVVDAVTGWCVPTLAVKATGRGSYQRTRLNKFGFPRGFLTRKKHHFGFQTGDLVRATVPTGAKAGTYAGRVAVRASGSFNIQTAHGVVQGIGHRHCRRMQRGDGYGYHHQPTVAQPSKGEREQGRASHAALSIPGVNAEVSRAN

SEQ ID NO: 19848 - protein, 447 aa, unidentified; identical to SEQ ID NO: 12853

SEQ ID NO: 19849 - protein, 414 aa, unidentified
MPCSPAKARLLLKEKKAIVVRRTPFTIQLTIATGETKQPVSLGVDAGYNHVGLSASTEKAELYASEIELRQDITDLLSARRALRQSRRNRKTRYRAPRFDNRIRTKRKGWLAPSVENRINSHLSRIEAVLRLLPVTKITVETASFDLQLLKNPNISGKEYQEGEQLGFWNIREYVLFRDGHVCQHCHGRSKDPVLNVHHLESRRTGGDSPGNLITLCETCHKELHRGEITLKAKRGQSFRAETFMGIMRWEVLDRLKASHPKLEVQNTYGYRTKHARIVNGIAKWHCADAFCIAGNLGAERLGEFLFQKQTRRNNRQIHKLSILKGGIRKRNQVPFEVKGFRLFDKVACKGEEGFIFGRRSSGFFDVRKLDGTRISAGISYKKLHLLEKRQTYITEIRKEKALPPLPEGRGLRA

SEQ ID NO: 19850 - protein, 442 aa, unidentified; identical to SEQ ID NO: 13114
  source 1..442: note = Candidatus Anoxychlamydiales bacterium

SEQ ID NO: 19851 - protein, 381 aa, unidentified
MENKIEYCFVVDKNNRPLAPTKVNKGWYLIRKGRAKLRSKYPMVIQLEKEVESDEGDKSYMVCGIDDGSVHVGLAIVQKCLTKNKVVFKGIIEQRQDVKHLMDVRRGCRRYRRYHKRYRQARFNNRSSSKRICRLAPSIKQKKDAILRVLYQLNKWIDIQGYYLEDVCIDVRAMTDGYKPYRWQYQKSNRLDENLRKATILRDGCKCQECGKSNCRLEAHHIRARRYGGADTIGNLITLCKKCHDKTKSREKDFEERYFNMIKSKPKRFDYAMHVMRGKSYLRKKISELGILHLTNGGETANKRIEWNIVKTHSNDAICIADGIPDTCDIKEWIIKPMRRKSKAKTDNVLGIKHRDLVSYTYKNGETYTGYVTALYPEQLL

SEQ ID NO: 19852 - protein, 378 aa, Lyngbya sp.; identical to SEQ ID NO: 2642

SEQ ID NO: 19853 - protein, 431 aa, unidentified; identical to SEQ ID NO: 4463

SEQ ID NO: 19854 - protein, 424 aa, Anabaena sp.; identical to SEQ ID NO: 10239

SEQ ID NO: 19855 - protein, 422 aa, unidentified
LNKRGKPLMPCSPAKARLLLKEKKAIVVRRTPFTIQLTIATGEAKQPVSLGVDAGYKHVGLSASTEKAELYASEVELRKDITDLLSARRALRQSRRNRKTRYRAPRFDNRIRTKRKGWLAPSVENRINAHLSRIEAVLRLLPVTKITVETASFDMLLLKNPDIAGKEYQKGEQLGFWNVREYVLFRDGHVCQHCHGRSKDPVLNVHHLESRRTGGNSPGNLITLCETCHKALHRGEITLKAKRGQSFRAEAFMGIMRREVLNRLKASHPELEVNNTYGYRTKHARIANDIAKSHCADAFCIAGNLGAERLGEFFFQKQTRRNNRQIHKLSILKGGIRKRNQAPFEVNGFRLFDKVACQGEEGFIFGRRSSGSFDVRKLDGTRISAGISCKKLHLLEKRRTYLTEIRKEEALLALPEGRSLRT

SEQ ID NO: 19856 - protein, 422 aa, unidentified; identical to SEQ ID NO: 9550

SEQ ID NO: 19857 - protein, 475 aa, unidentified
MVAVVTSTGKPLMPTSAYRARKLLKKGRAVIFKYRPYFTIQLVDRADGEVQEVEYKSDTGSVHVGISVCTEKKELLSEQRDLLENEPEHHNDRKKNRRTRRNRKRYRKPRFDNRKKKPQEGHEKWLPPTLLHKMEVQVRLFREFCRVVPVTSACFEMGKFDTQALKAVSKGEPVPEGEGYQKGERYGTDTLRAAVFLRDGHTCRFCGRSVKDGAILHVHHVGYWKGDRTNRPANLASACEQCHTPANHGKNGILYGKEPEFKTLKDASYMTSVRWIMLDEIKKAAPGVQVSVTYGVTTKRKRQELHLPKNHVNDAFSMASFHPKKRSDTEYWKKIPRHDRVLQKFYDAIYLDTRDGSEKKGSELSNGRISRNHKKDSENLHQYRGHKVSKGHNSIRRGASSLKPGSIVMYKGEKMTVHGTHTRYVKGKDGKTAKKVNVQFTCPASDGKKSASLEKCTPVSRVYNTGWKRYWPDKK

SEQ ID NO: 19858 - protein, 480 aa, unidentified; identical to SEQ ID NO: 2726

SEQ ID NO: 19859 - protein, 447 aa, unidentified
VPAYRFKHITKKEVPYMVYVLDIDGLPLMPTSRHGKVRRLLNSHLAKVVKRCPFTIQLLYQSTKETQPVSLGVDAGSRHIGLSATTEREVVYQEELVPRNDIVKLLSARRALRRSRRNRKTRYRRVRFNNRVHSKHKGWLAPSVEVKIQEHITATKRICQILPIFDIHVETAEFDLQRLKAMEEGRLLPAGTDYQLGEQYDFYNTRQYVLHRDEYTCQCCGTHDNNVKLHVHHVESRQTGGEAPNNLITLCEHCHKSIHAGKMMLPKGKKRGKSYRDAAFMGIMRNTLLERLRKEVNVPVTMTYGYITKYWREKAGLEKSHINDAICISKHPYARPLETYYLTKAVRHHNRQIHKTKFSKGGIRKRNQAPYLVKGFRLFDKVLYQGESYFIFGRRITGYFDIRTLDGTKVNKGSTSYKKLRIQDTAEAYLTEVRAIPHMNEFTCVLA

SEQ ID NO: 19860 - protein, 411 aa, Clostridium sp.
MVEYSFVVDLSGNRLSPCNKNKAYYLIRKNKAKMLNKFPMVIQLQKIINDDDNDDVKNYLGIDDGSKNVGLGIIQQCNTKIKTIFKGTIELRQDVSTKMTVRKGYRKYHRYHKRYREKRFDNRRASKRKNRLAPSILQKKQSILRVVSKLLKWTKIDAVYLEDVLIDIRAMIEGKELYKWQYQKSNRLDNNIRLAVFMRDNFECVDCSSKIKLQMHHAKPKNSGGADSIYNGVTLCEKCHIKTFGKELQMMDKYLTKIKGKNLCLRHPMHVMQGKKYLQGELGKIAPLSLTTGADTANHRIDWNIEKSHSNDALVICGTKIKSTDINIKDWHIKPLRKKSKGDVETIVDGFKLRDYVKYTKRNGVCYIGYITALYPDRKQFNMTTKDNIILKRYGLKSLNLISRPNSIRFS

SEQ ID NO: 19861 - protein, 427 aa, Beggiatoa sp.
MQRVFVLDHNKQPLMPCHPARARKLLKKGKAAVYRRYPFTIIMTHRLCGDLQPIEIKFDLGSRTTGIALVGHFDRGSEVIWAGNLNHRGYQIKKDLNSRRAIRRTRRNRKTRYRPARFLNRRRPTGWLPPSLRSRVLNVNNWMLKLSQLAPLTQIAVETVRFDTQKIQKPEISGVEYQQGELAGYELREYLLEKWGRECVYCGAKNVPLEIEHIQARSKGGSDRVSNLTLACTPCNIDKGNKDIKEFLKRKPKRLKKIQTIATASLKDAAAINATRYATGNALKGFGLPIAFSSGGRTKFNRTSCGYPKDHWIDAACVGESGSDVFIPKMITPLIITAKGRGSRQKCRMNQYGFPRTRPKKHKRVKGFQTGDIVKAVVTKGKNIGTYIGRVVVRARGSFDIGIGKKKVSGISYKYCQLIQRVDGYEY

SEQ ID NO: 19862 - protein, 415 aa, Bacillus sp.; identical to SEQ ID NO: 2431

SEQ ID NO: 19863 - protein, 431 aa, unidentified
QFDDSIPRRNYPHESAKGLKVFVLNMRGKPLMPCSPAKARHMLKAGKAVVVRRTPFTIKLTIATGETKQDVTLGVDAGARHVGISATTEKEEVFASEVALRQDITGLLADRLAFRRARRNRKTRYRAPRFNNRVRSKHKGWLAPSVENRIQAHISRIEAVCRLLPVTKIVIETASFDIQKIRNPEVEGTGYQQGDQLGFWNVREYVLFRDGHVCQHCHGRSRDKILNVHHLESRKTGGDAPNNLITLCETCHKAYHAGKIKLKVKRGHSFRAEAFMGIMRWTLLNRMRKAHHSLPVENTYGYLTKHKRIALGLPKTHCADAFCIAGNLKALRRGDFLFQQQTRKHNRQIHKCSILKGGVRTLNQAPFLVKGFRLFDKVRIGGQIGFVFGRRVRGTFNIRRLDKTVIGTDINCKKLSLLETRKTFLTELRKE

SEQ ID NO: 19864 - protein, 512 aa, unidentified
MSTVYVLNKDGKPLMPTTRGGHVRHLLKEQKARVVRAKPFTIQLLYETNDVVQPLYLGIDPGRTNIGVAVVKANGTAVFTAHLETRNKEVPKLMQDRKKARRARRTNGRRCRRQRRAKANGTISKKCVKQDTAQSKNPSKRAKEIGIIKRRLPGYKKDVLCIGIKNKEAKYTNRTRPEGWLTPTANQLLQTHINLVRKMQKFLPISDVVLEVNKFAFMRLDNPDIQKWQYQQGPLYQKGSLENAVSEMQEHHCLFCDKPIDHYHHVVPQSENGSNTIANIVGLCAEHHNLVHKDAAWQKKLAEEKVGLNKKYGALSVLNQIIPALTNKLSVLFPKHFFVTAGKSTHDYRAAHGVSKDHWLDAYCIACSVLPSNVCDSNINNHMPYELKQFRRHDRRVLNNENMNRVYTLDNKTVAINRHKATEQEAASLEEFRKEHPNDVCKLKVKEHHPTYRNMNRNYPGSIFLVGKHVHIMQGIAGSKDGKATTYKDSNANSITASKCKFVAKNSGILFV

SEQ ID NO: 19865 - protein, 481 aa, unidentified
GIDSGRENIGSGASNEDGDCLYLGELKTSNKSIKIKMTERTGFRRERRRHDRQSKQRKEKKDHTEIQNGNDDICRTTISCKSVQISYPVAEESVTHKIIRGKEGKFANRHRDEGWITPSARQLVQMHMNDLKSMCKILPINHVTLERVAFDFQKLENENIKTWEYGKGKLYGYDSPEEYIHDVQDGKCLVCGKPHIDYLHHIIPRSKGGSDKVSNLAGLCYDCHYGPMGVHNCRETQDRLPELKNEANKQYKVSLLNSVMPVLIEEMDKFCKANSIIFSICEGHDTAKVRDMYDLQKDHCLDGFAISLVGRNVKSVDVMPDRIYQKQRYKKKSKNIIQKRNCREYYDGKKLVAVNRHKGTDQKADSLEEYMNTYAETHTADECKKHFDSLTVKPARRTYTFHKKGCICPFHIGDKVRYEKKNKIKGNTKVETFICESIHFYKDENKAKVEHNKTKSKRMKFCRVLEAGCTPYIDYRKLALM

SEQ ID NO: 19866 - protein, 464 aa, unidentified
MVIALDKNKRPVGFLTEKRCRKLFEQKRAVRYRMFPMVVILKDIDVRTFTQPLPEYRLKIDPGAKHDGFAIIDPVRDAIVYTLQVEHRAGQVKQNLDARRQARRNRRSRETVYRKNKFAQGGTFTQTGNEGKLPPSIQSILANTETWVKRLSRWVNLTSVSLEAVRFDTQLLDDPAIEGKEYQQGTLQGTEIREYLLDRYQHTCQYCGGVSGDPVLEWEHIRPRSRGGSDSIKNATLACHRCNQDKGSMTPEEWAGQLKTQKTKLSRARLQGIEKVLAGKRNGGSSRYCAWVNITRKELERFLFACFGEVECTSGGRTKYNRTRLRLPKDHQYDAACIGKVPEQGYTDLTHGYYTLAKAVGHGSHFRGKINSCGIIIQKLPPREKNVFGFMNGDIVAADIPKREKRPYKYEGHHVGRVMTRARGEFDIRTTDGRLIGANHRYITKIQNADGYQYAQCRTPGVSG

SEQ ID NO: 19867 - protein, 415 aa, unidentified; identical to SEQ ID NO: 15716

SEQ ID NO: 19868 - protein, 417 aa, unidentified
MPCSPAKARLLLKEKKAIVKRRTPFTIQLTIATGEAKQPVTLGVDSGYKHIGLSATTEKAELYASEVELRQDITDLLSARLALRRSRRSRKTRYRAPRFDNRVASKREGWLAPSVENRIAAHMSRVEAVMQVLPVTAITVETAAFDTQLLKNPNIAGEAYQQGEQLGFWNVREYVLFRDGHVCQHCRGKSKDPILNVHHIESRRTGGDAPNNLITLCETCHKAFHRGEIELKVRRGKSFKAETFMGIMRWTLFERLKKAHPELRVRNTYGYLTKHKRISHGIAKSHCADAYCIADNLGAKRLEGFFFQKQTRKHNRQIHKLSILKGGLRKKNQAPYEVKGFRLFDKVICKGEEAFIFGRRTSGSFDVRRLDGTRISAGINYKKLRLLEPRTTYLTEFRKEAALPPLHECSGSRAEFR

SEQ ID NO: 19869 - protein, 456 aa, unidentified; identical to SEQ ID NO: 10331

SEQ ID NO: 19870 - protein, 544 aa, unidentified; identical to SEQ ID NO: 9634

SEQ ID NO: 19871 - protein, 515 aa, unidentified; identical to SEQ ID NO: 9146

SEQ ID NO: 19872 - protein, 422 aa, unidentified
MPCKPSKARKLLKQGKAKVVKKEPFTIQLLHGSSGYKQKCIAGIDTGSKNMGVAVATEDGRVIYKAQVYLRQDIKENIEARRRLRRTRRNRKTRYRKARFLNRKRKEGWLPPSIKARIEAHYNIARKLAKIIPISEIRVEVGQFDTQALQNPEIRGIEYQQGEMQGFDSVKEYVKIRDNYQCRYAKLRPDIPCSDKLTVDHIIPRSKGGTDNPSNLVCCCEAHNIAKGSMSYKEFTGKISPKIEDFRSTVFMNVSRYYLVPMLQKIAPTKYTFGLYTRRKRKEWAIEKSHINDAIVIAGIKPRWQDDAWYYIRQVRKKKRSLHEEIPRKGRKQPNREAKRNNKNEKEIIVRGKKWCLRDKVYIHELSEAGFISGFTGKWVYVQDIHGNYLQLSDKYKQINPEKLELMYRNNNYICERFISTL

SEQ ID NO: 19873 - protein, 431 aa, unidentified; identical to SEQ ID NO: 6230

SEQ ID NO: 19874 - protein, 480 aa, unidentified
MKGENMVIALDKNKHPLGFMGERRCRILLEKKRAVLYRYFPTIVILKDVDARKLSGLSSYRIKIDPGAKYTGIAIVRDDTNEFMYAMQIEHRGEQIKKNLDTRRSARRNRRSRETGYRRPKWGNQCTAKKQRQSYDSQRGENWLPPSVKSTADNIISWVRRLSRWINITNCSFESVRFDTQLMENPEIEGVEYHQGTLYGYEVKEYLLEKYGHTCQYCGGKSSDPILEWEHMIPRSRGGSDRLKNATLACHNCNQDKGNHTLEEWQTILQDRIPKERGKQKELDQIRQKFVQQVMEGKTPLKGLRYAAWVNSSRRYSQRHLYLRFPELECSSGGRTKYNRNALGYPKEHHYDALCVGKIPEDRFVDRTHGYYLYAKATGRGTRLRGQINQCGVITHKWRDRSKTAFGFQTGDLVVANVPKDTKYKYKGRFVGRVMIRKSGSFDIRTLSGELVTVNAKFCRLLQNNSGYQMMIKRAIPLGN

SEQ ID NO: 19875 - protein, 434 aa, unidentified
MSFLATWARRKILLQRKVAEMLTTKKYAFVLDAEGKRLDPTIEQNAWRLVRQHKARLVSKFPMVIQLNKVVDNPNNDEIRCGIDDGANHVGLALVQKCQTKNKILFKGTIEQRKDVKHLLTIRRGYRRYHRYHKQHRPARFLNRASSRRSGRLMPSIIQRKQATLRVIDRLRQWIRIDGYWLEDVKIDIRALTDGYRPYRWQYQKSNRLDNNLRLATIYRDGHKCMECGKTKTRFEVHHITPRETGGANTISNLITLCPACHARTFGRELQFVNRYYAMIGSAVHVEGLDDAQRVMQGKHWFREQLQQRGTLSLTTGADTANKREDWNIVKTHANDAVCITDLEPDSIDIENWTIKPMRRKNKAGVDEVCGFRHRDYVTYTYRNGEVHTGYVTAMYPDKGQLNLQSPTKHCKRVNALKTRLLWRFNKIYWFKCA

SEQ ID NO: 19876 - protein, 344 aa, unidentified
MSDVEIRNDIADKMSQRVKYRRNRRNRKTRYRKARWLNRKNSIKKDRFSPTMRSKLDSHMKEIEFIKSILPISRLVMETATFDPHLLKNSSLHNPIYKKWGYQQGGNYGFENTKAKVLNRDNYICQHCKGRRKDSKLEVHHIIYRSNGGSDEEDNLITLCHTCHKCVHSKSIKLKLLGKRKGQLKHATQMNSIRLQLLKLCSDAIETFGYITKANRLLLRVDKKHHLDACIIASGGNKFTIRQNILYRKKCIPNGDFQQTKGVRSQQAIPTGKIQGFRKFDKVRYLGKEYFIKGRMSSGYAILMDIEGNKVDFSSMPKGWKTPKLSNCKRISARKTWMVDSLVV

SEQ ID NO: 19877 - protein, 419 aa, Geobacillus sp.; identical to SEQ ID NO: 2623

SEQ ID NO: 19878 - protein, 420 aa, unidentified; identical to SEQ ID NO: 3546

SEQ ID NO: 19879 - protein, 545 aa, unidentified
VQFAWWLCHPKPSDNIEDVNHETALMLLQIKAGTETFGTAPCGSGPKAEGVSPERKAMNTVAVVTNTNKPLMPTSPYRARKLLSSGKAKIVKHRPFTILLVNRSDGNVQEIEYKSDTGYLHVGISVCSEKREFVREQRDLLPDEREKHNDRRKYRRTRRNRKRYRKARFDNRIGKIRKKEKNEHVWLPPSLEHKVDAQVQLFLRLYQVMPVKRAVFEMGQFDPALMKALEKGESAPQGIDYQIGERYQIATRRAAVFTRDRYACVFCGRGIKDHAILHVHHIGFWKQDRSNRLDNLATCCEQCHTSENHRPGGILYGVEPKLESLASATYMNAVRFELLRRLKEAAPDVEFHISYGAKTSVIRKQRSISKSHTNDAYCLGQYFPKLRAEEIGFQKIRRNDRILQKFYDAEYLDSRDGTTKKGKELTNGRISRNHMKDHKNLHQYRGKKLSKGRVTIRRGRSSLKPGSLVRFDGEVLTVHGTHRSRRKNKAGHIKVSVNVEFERPSKTGRKSAALSKCQIISQSYNTGWKKIQLRKEEQGKIAAVG

SEQ ID NO: 19880 - protein, 192 aa, unidentified
MVYVQDIDGKPMMPTTRHGKVRRLLKDNKAVVVNTCPFTIKLTYKTSDYKQEIVLGVDSGTKHVGLSATTKSKELYASEVILRSDVVDLLSTRRGLRRTRRSRLRYRKQRFNNRVKSKKDGWIAPSVRHKIDSHIRIISFVYSILPVSKLIVEVAQFDTQKIKNPEISGKEYQEGEQLGFWNVREYLGKGWA

SEQ ID NO: 19881 - protein, 470 aa, unidentified; identical to SEQ ID NO: 2925

SEQ ID NO: 19882 - protein, 418 aa, unidentified
MVYVINKEGQALMPTERFGKVRRLLKNGLAHVICRIPFTIRLNYETTHFVQPISLGVDAGSKHIGISATTSEKELYAADVELRNDIVDKLSTRREQRRTRRNRLRYRKARFNNRVSSKHKGWLAPSVENKIQTHLTVVEKIHKFLPITKIIVETASFDIQKIKNLSISSEEYQQGEQLGFFNVREYVLFRDNHTCQHCKGKSKDHILNVHHIESRKTGGNSPSNLITLCESCHKAYHNGKIDIKIKRGASFRDATFMGIARWTTYERVKNIYPNVSMTFGYITKNTRITNGLPKEHYVDARCISGNPKSKPLGYYFYQKKVRCQNRQIHKANFLKGGRKKLNQSPFLVKGYRLFDLVEYQKKLYYIFGRRDSGFFDIRRLDGTKVNKGSISCKRIRLVDIRRNIITERRNSCSIPPTN

SEQ ID NO: 19883 - protein, 447 aa, unidentified
VPAYRFKHITKKEVPYMVYVLDIDGQPLMPTSRHGKVRRLLNSHLAKVVKRCPFTIQLLYQSTKETQPVSLGVDAGSRHIGLSATTEREVVYQKELVPRNDIVKLLSARRALRRSRRNRKTRYRRVRFNNRVHSKHKGWLAPSVEVKIQEHITATKRICQILPIFDIHVETAEFDLQRLKAMEEGRLLPAGTDYQLGEQYDFYNTRQYVLHRDEYTCQCCGTHDNNVKLHVHHVESRQTGGEAPNNLITLCEHCHKSIHAGKMMLPKGKKRGKSYRDAAFMGIMRNTLLERLRKEVNVPVTMTYGYITKYWREKAGLEKSHINDAICISKHPYARPLETYYLTKAVRHHNRQIHKTKFSKGGIRKRNQAPYLVKGFRLFDKVLYQGESYFIFGRRITGYFDIRTLDGTKVNKGSTSYKKLRIQDTAEAYLTEVRAIPHMNEFTCVLA

SEQ ID NO: 19884 - protein, 481 aa, unidentified
VWHALQTKITLAKVSTQAVGNLCNYGSQIPSRVLFSAIHLAIRKGGIIMYVYVINKHGQPIMPCKPRKARVLLQKGKATVVKQVPFTIRLLYGSSGYKQPVSLGMDAGSKHIGIAATTEKKVLYAEELKPRNDVIKLLSTKRQNRRARRNRKTRYREARFDNRVSSKQKGWIAPSVEVKIQEHISAILRIQKILPLTEIYVETAEFDTQRLKAVAEGKPLPTGTDYQLGEQYDSYNTRQYVLFRDGYKCQCCGKHGDDVKLHVHHKESRQTGGDAPNNLITLCEYCHKAIHTGTTQLPNDKAKRGKSYKDAAFMGIMRKAMVSQLRKLVDIPVTETYGYITKYHRELYHVEKSHINDAIMISKNYEAVAADTYYVSKAVRHHNRQLHKNTILKGGIRKRNQAPHVVKNFRLFDLVKYKNSYYYVFGRRSNGFMDIRTLDGKKVNKGSISNKRLKFVSASKGLLAERKKAIPLADKSASFLA

SEQ ID NO: 19885 - protein, 421 aa, unidentified; identical to SEQ ID NO: 5074

SEQ ID NO: 19886 - protein, 445 aa, unidentified
  REGION 1..445: note = IscB polypeptide
MQKLEKRDTYTPTDAPQVRSNCDSVIKHGHSDQVLQNLKTFSNNSDVDQLSGRREQDLRVPVLNMHGEPLMPTTPAKARHLLEQNKAKVVTRKPFTIQLKYATGETKQPIILGIDSGYKKVGISAVTDKKELFSAEITLRTDIPKKLQNRAMYRRTRRSRLWYRQPRFLNRSKPKGWLAPSIQHKLDSHIRIVDKIKELLPITKVIVEVASFDIQKIKNPEIKNEEYQQGEQLNFYNIREYVLHRDNHTCQHCHGKKKDKILQVHHINGKSEGATNKPSELLTVCKTCHDEHHKGIDIIPKKKIRNFKPETFMSIVRWKIVNLLGCEHTYGYITKCNRIKQKLLKSHSNDAFVIAGGTTQKRSKSYIVKQIRRNSRRLQINRKGYRPSIRRKRYKLQPNDVVKYNRKEHRVKSVHCKGSRVILDIKKSIAMNKTELIYYGKGIFN

SEQ ID NO: 19887 - protein, 465 aa, unidentified; identical to SEQ ID NO: 3070

SEQ ID NO: 19888 - protein, 465 aa, unidentified
MSTCVCVLSNNGERLMPTIRLGKVRHLLKDGKAKIIKHHPFTIQLLYDSETNIQPIEICEDVGYNYIGISVKSQSHEYVSAQYDTLQDEKSCHDACRRMRRTRRNRLRYRQKRFDNRKRDKGWLAPSLKHKKELNVNVIKMYCEVVPITHATVEVGSFDTMLVKAIEEGKATPEGADYQKGPRYNLATLREAVFYRDNYTCQVCGREASEGAILHVHHMFYWKGRHDNSLSELITVCEKCHTPANHQKGGKLYGFGEDIKFANLSGAAFMNTVRWQIVNELYAAFGKPFVTFTYGAMTKEKRIALHLEKSHNNDAYAMGEFHPNCRCTFEHYEKVRRNNRTLEKFYDSRYIDIRTGEIATGKELFNGRINRSHKKDSENLHKYRGKRIRKGYRALRRKKVALNPGDLVSLNGEILTVHGTHTKKNGSVNVEFKTPSKSGKKSTSLKKLKIIKTISPMRSAWDKVS

SEQ ID NO: 19889 - protein, 458 aa, unidentified; identical to SEQ ID NO: 4474

SEQ ID NO: 19890 - protein, 469 aa, unidentified; identical to SEQ ID NO: 7056
  source 1..469: note = Firmicutes bacterium

SEQ ID NO: 19891 - protein, 420 aa, unidentified
VVYVISKTGQPIMPTENHAKVRMLLKLGKAKVVKRTPFTIQLTGTSKTFTQEVTLGVDAGSKHVGLSASTAKKELFSADLRPRNDVVDLMSSRRELRRSRRNRTTRYRQARFNNRVHSKHKGWLAPSVEVKIWNHIQGIRLVTKLLPVKTICVETAEFDLQRLKALEAGEPVPVGTDYQLGGMYGQYNVRQYVLHRDGYSCQCCGAHGTNKRSVKLHIHHLESRKTGGNAPDNLITLCEDCHTGYHAGTVALLTTKRRRKSTRDATFMGIMRKTLLERLRNMFPDASICSTYGYITKYWREKKNIVKTHTSDAFVIAKNLDVERLDRSLLIVPKRQHNRQIHKCKINKGGMRKLNQTPKFVFGYQLFDRVMCMGQEGFVFGRRSSGGFDIRKLSGEKIKPNISYKKLKRLESRKALLISY

SEQ ID NO: 19892 - protein, 424 aa, Moorena sp.
MRVFVLDKNRKPLDPCKPARARILLKQGKARVIKRYPFTIIIQEKEVKNCVTHKHQLKIDPGAKTTGLAIVQDNQVIWGAELTHRGFQIKDALTSRRQLRRSRRNRKTRYRKPRFLNRKRPEGWLAPSLMSRVHNILTWTKKLIKLCPITGISQELVRFDTQKMENPEISSVEYQQGTLYGYELREYLLEKWNRKCAYCGAANTRLEIEHIKPLAKGGSNRVSNLAIACYKCNQAKGAQEIEQFLSGKPSILKRVFAQRKKPLANAAAVNSTRWKLYEELKSTGLPIETGSGGLTKYNRCRQNLPKTHWLDAANVGQVDNLHIEDFKPLLITAKGHGTRQMCRTDKFGFPSRYVTRLKFVKGFQTGDIVKAIVTKGKKIGTYTGRVATRQTGSFNISTKNGLVQGISHKYCSTVHRKDGYSYSF

SEQ ID NO: 19893 - protein, 437 aa, Bacillus sp.; identical to SEQ ID NO: 3400

SEQ ID NO: 19894 - protein, 411 aa, unidentified; identical to SEQ ID NO: 3917

SEQ ID NO: 19895 - protein, 431 aa, unidentified; identical to SEQ ID NO: 6230

SEQ ID NO: 19896 - protein, 424 aa, Moorena sp.
MRVFVLDKNLKTLDPCRPARARLLLKQGRAKVFRRYPFTIILSDLEVENCTTHHHQLKIDPGAKTTGLAIRQNNTVIWGAEITHRGFQIRDALTSRRQLRRSRRNRKTRYRKPRFLNRKRPERWLAPSLMSRVHNILTWVKKLIRFCPIAGISQELVRFDTQKTENPEISGTEYQQGTLYGYEIREYLLEKWNRKCAYCGTTDTKLEIEHIKPKSLGGSDRVSNLAIACHDCNQAKGNQEIQQFLSGKPDVLRRILSQAKRPLADAAAVNATRWKLYKELKSIGNPLETGSGGRTKYNRCRFNLPKTHWLDAACVGNVQSIYVENYQPLLIEAKGHGTRQICRTDKFGFPKRYCSRTKIHKGFQTGDIVKAVVTKGKKIGTYVGRVATRKTGSFNISTANGLIQGISHKYCQPIHKKDGYAYTI

SEQ ID NO: 19897 - protein, 452 aa, Lactobacillus sp.; identical to SEQ ID NO: 3322

SEQ ID NO: 19898 - protein, 428 aa, Moorena sp.
MQNYVFVIDTNKQPLNPIPPKKARRLLDKGKAAVFRMYPFTIILKTAINNPVVTNCQLKIDPGSKVTGFALVQNNQVIWGMELEHRGGLIKKKLESRSAVRRGRRNRHTRYRKPRFLNRKRPEGWLPPSLEHRILTIETWIKRLIKFCPVNEIWVERVKFDTQKMQVPEINGVEYQQGELAGYEVREYLLEKWGRECTYCGKQSVPLQIEHIHPKSKGGSDSAKPTLRERVSNLCLACEKCNQRKGNKPIEEFLKKKPSLLQKIKTKAKQPLKDAAAVNATRNKLVKVLWNIKPLITGTGAQTKYNRIKLGFPKEHWVDAACVGDIEILELRTNQPLLVTCKGQGGRQKAALNKYGYPIRHNPLKPIKGWCSGDIAKNILTGEFGRVNPRSKSNSFNYTVRGNKAISLHVKNLTRVHKKDGYTYGFCR

SEQ ID NO: 19899 - protein, 426 aa, Anoxybacillus sp.
MVFVLDTNKRPLAPCHEAVARKLLKQGKAAIYRRFPFTIILKKSVDESEIKATYRLKIDYGSRHTGLAILRGQEVVWLGQLDHRTDIKERIDKRRAFRRARRNRKTRYRKPRFLNRKRKEGWLPPSLESRMQNIKTWVERLRKICPIEHISYENAKFDTQLMRNPEINGVEYQQGTLQGYEVREYLLEKFGRKCCYCGKEGVPLEVEHIIPKSRGGTDRIDNLCLACRDCNQRKGSQTAEEFGYPHIQEMVKKTLKDASVVNATRWKAYEVLKQTGLDVECGTGARTKMNRIRLDLPKTHYFDACCVGESTPNHLYFKTKEVLFIKAKGRGSRSRTNLDRYGFPRGYLARQKFFFGFQTGDMVKAVVPRGKYQGVWFGEVACRKTGSFDIKGKDGKRIAQGINYRYVQVIQRFDGYAYGKGVAELA

SEQ ID NO: 19900 - protein, 422 aa, Deinococcus sp.
MSNRVFVLNPDKSPLMPCTAKRARKMLEAGRAAVFRRYPFTIILKSESPRQSQPLALKLDPGSKTTGMALVMEGKTGRKCIWGAELAHRGLAIKLKLQARRALRASRRSRKLRHRPARFQNRTKPAGWLPPSLMHRVLTVVSWARRLERWTPLDSFSMELVSFDMQKMLNPDIQRDEYQKGTLFGAEIRAYLRQKWDDKCAYCGKKGEEVEHLIPRSQGGTNRVSNLVWSCRSCNEQKGSLTLEEFLAKKPAALRKIQEQQSASLHDAAAVNATKYRLLEELKAFGYPVETGSGAQTSFNRTQQGYDKAHWIDAACVGDSGASVAIRPLKPLKITCMGRGNRQMCGTDKYGFPVRHRTRQKVFFGFQTGDIVRAVVPSGKYAGRHTGRIAVRAKPNFKLGTFDVHVKYLIALQRADGYGYNF

SEQ ID NO: 19901 - protein, 437 aa, Streptomyces sp.; identical to SEQ ID NO: 3250

SEQ ID NO: 19902 - protein, 480 aa, unidentified
LYTKPLDNIGEGSLPPSGEINLKGMTFMVYVKSIDGKALMPTSNAKARKLLKQKKAKVVSLRPFVVKLTYKTKTEYTQKLNLGVDSGYSNIGFSVIDAKQEYIAGEVKLLEGMKKRLLEKASYRRIRRSRLRYRKARWNNRVKSKKKGWLAPSLKHKLDTHIKFIDYLKNILPIGKITIEVANFDIQKMKDDLISGIDYQNGDMFGFWNMREFVLHRDGHKCQNPNCKHKDKKEQILKVHHIRYRSEGGSDRPENLITLCSKCHTPVNHKKGKFLYDWCVNGKKVRGFKDATFMSMIRWYLVNELKSKHNNVSITYGYITKNHRIQNGIEKSHLNDAFAIAKGTNQARTKDRFLVIQDRLKNRSLEKFYDSKIIDIRTEKKVSGGDLNCGRSTRNKNLNTENLRKYRGVKISKGQRRIRKQKYFYQPNDLVKYDGKVYTVKGTQNEGKYIALKEIKKVPKVELLIPYVFKKGLNWSYGLC

SEQ ID NO: 19903 - protein, 426 aa, Moorena sp.
MQNYVFVIDTNKQPLNPIPPKKARRLLDKGKAAVFRMYPFTIILKTAVDNPVISPCQIKIDPGSKVTGFALAQNNQVIWGMELEHRGGLIKKKLESRSAVRRGRRNRHTRYRKPRFLNRRPPEGWLPPSLEHRVLTIETWVKRLIKFCPVNEIWVERVKFDTQKMQNPEITGTEYQQGELAGYELREYLLEKWGRECTYCGKQSVPLQIEHIHPKSKGGSDSAKPTLRERVSNLCLACEKCNQRKGNKPIEEFLKKKPSLLQKIKAKAKQPLKDAAAVNATRNKLVKVLRRIKLVVTGTGAQTKYNRNKLGFSKEHWIDAACVGDIETLILKTSQPLLVTCKGQGGRQKAALNKYGYPIRHNPLRPIKGWVTGDIAKHQKLGIGKVTPRSKGSFGFTPLGMKGYKSCKPQDISAIHRKDGYTYSFC

SEQ ID NO: 19904 - protein, 457 aa, unidentified
MDAVAVISASGKPLMPTNPVRARKLIKKGKAVIYKYRPLFTIRLTERTDGDIQTIEYCCDTGYQHIGLSIKSRKHEYVNEQRDLLPNETERHNDSRKYRKARRRRKLRHRACRRDNRHDNQICKDGYAPSIRNKRDQHISLYRSYTEILPVERAVFEMGQFDTQVLKAIEKGEPLPQGKDYQHGERYGYATLREAVFARDDYTCICCGKNSFKDKRILCVHHLGFRIGDRTNRLANLATVCTKCHTPKNHQPKGKLYNLKPELKDFKGATFMTMVRWDMLDKLKVVSKDIQVDVTYGAATKEARRDLKIKKSHANDAYCMGSFHPSHRTDLKRYEKCRRNNRVLSKFYDATYIDIRDGKKKKANALGCNRTKRRESRRSEKNERIYRGKKVSKGRIVLRTKRAVIRPGDIVYVGKKKYIVASSKNLGAQLKLADGSLLTTSKVTKIIHCGGWKTVTM

SEQ ID NO: 19905 - protein, 451 aa, unidentified
MPVAVISKTGERLMPTSEYRARKLLKSGKAIKYSYRPFTIQLTERETGDIQPIELCMDTGYIHIGISVKSEKHEYLAEQIDTLTDERSRHDACRMYRRQRRNRKRYRQPRFNNRKKDKGWIAPSLEHKKNIHIQAISRINNVMPLTDITMEMGNFDTQVLKAKEEGNPLPQGADYQHGERYGIATLREAVFTRDDYKCQCCGRTIKDGAILHVHHIKYRSQGGTNSMSNLATVCDKCHTPKNHKPEGKLYNWKPKLPSFKGATFMTTIRWQLYNEVKTLFPDIDIHITYGAATKERRRELDIDKSHVNDAFVMGQFHPKHRIKAVLYKKKRRNNRCLEKFYDAKYIDSRDGKKRSGQELFNGRINRNHKKDSENLHQYRLQKVTAGKRTVRKQHYGIQPHDIIVYENRKRETTGCHCSGTRVMLLPDKKSVSIKKIKIYKYAGGYFKSAFN

SEQ ID NO: 19906 - protein, 476 aa, Blautia sp.
LEAAGTEGVSHPGLPGKYKYKRGQLMSVAVINKTGERLMPTSEHRARKLLKSGKAIKHSYHPFTIQLTERESGDAQPIELCMDTGYIHIGTSVKSEKHEYLAEQIDTLTDEKARHDACRMYRRQRRSRKRYRQPRFNNRKRNDRWIAPSLEHKKSIHIQAILRICKAMPVTDITLEMGNFDTQVLKAREEGKPLPHGADYQHGERYGIATLREAVFTRDDYKCQCCGRTIKDGAILHVHHIKYRSQGGTNRMSNLITVCDKCHTPANHKQGGKLYNWKPKIASFKGATYMTTIRWKLYNEARALFPDIDIHITYGAETKERRRALDIDKSHVNDAFVIGQFHPKHRSKPICYKKKRRNNRCLEKFYDAKYIDSRDGKKRSGQELFNGRISRNHKKDSENLHQYRLQKVTPGRRAIRRQHYPIQPHDIIVYNGNKIEVSGCQHKGTRVVFSKTKKSVQISKIKLFKYAGGYSKSVFN

SEQ ID NO: 19907 - protein, 424 aa, Enterococcus sp.; identical to SEQ ID NO: 4949

SEQ ID NO: 19908 - protein, 423 aa, Moorena sp.; identical to SEQ ID NO: 9894

SEQ ID NO: 19909 - protein, 420 aa, unidentified; identical to SEQ ID NO: 5662

SEQ ID NO: 19910 - protein, 451 aa, unidentified; identical to SEQ ID NO: 5203

SEQ ID NO: 19911 - protein, 398 aa, Anoxybacillus sp.; identical to SEQ ID NO: 9240

SEQ ID NO: 19912 - protein, 533 aa, Streptosporangium sp.
MTTFPMSEKTHQAVLPQRLALESVGADNPGGGDETAHRLPAMPGTGLEHGRGEIEQIGTRSARRHPKGASASEGANREVHPAVFVLDKHGQPLDPCHPARARRLLAAGRAVVARHTPFVIRLKDRTAADSTVQGVQVSIDPGSKHTGIAVFTEHDGDRNGRYALQLDHRGGQIHDKLTARSQYRRRRRSKNLRYRAPRFNNRTKPTGWLAPSLQHRVDTTMSWVTRLIRWAPVTAVHVEKVAFDTHALSAGRPLEGAEYQQGTLAGYEVREYLLAKWGRTCAYCGAQNVPLNLDHIHPRFRGGSDRISNLTLACIPCNQTKNATPIQEFLKAAPALLVTILRQAKAPLRDAAAGNATRWALWRALEATGLAVATASGGRTKWNRSRTGAPKSHTLDALHVGDLDTVTSWPGAVLVVKATGRGSYVRTRTDKHGFPRLRLPRTKQVEGFTTGDLVRATVPSGKKAGVHIGRVAVRSTGRFNIATRYSTVQGIGHRHVRLLQRADGYGYITRSETRDRSVFPPGPEGPGFHAGGN

SEQ ID NO: 19913 - protein, 408 aa, unidentified; identical to SEQ ID NO: 5302

SEQ ID NO: 19914 - protein, 442 aa, unidentified
MVTVQQSTHHLPFGRVFIRRNLFMVYVISQDSKPLMPCSNPIARLLLKQGKAKVKKREPFTIKLTYETTNHTQGLTLGVDTGSGTIGAAVSKDNGDIVYMSEVVVRNDITDKMTQRAKYRRNRRNRKTRYRKARWLNRASSIKKDRFSPTMQSKLHSHVKEIEYIQSILPVTEMVFETGQFDMQLMKNPSLANPKVRPWGYQKGANYGFENTKAMVLNRDNYTCQCCKGKHKDSKLEVHHIVFRSQGGSDEESNLLTLCHTCHKDLHSGKINPKLSGKVKGNLKYATQMNSIRKQLFRFYPNAIETFGYVTKANRLHLGVDKEHYYDACTIATQGNAFNVKSNLYKKKCVSDGDFQKTKGIRSEQPIVTDKICSFRKFDKVRYFGKDYFIKGRMSTGYAILMDIDGNKIDFSTMPRGYKTPKLSNCKRITARSTVMTQVKVV

SEQ ID NO: 19915 - protein, 472 aa, unidentified; identical to SEQ ID NO: 4119

SEQ ID NO: 19916 - protein, 508 aa, unidentified
MTALEEKLSKTEYIYVLGFDGKPQMPTRRKRHVLKLLKTGRARIAEDIPFTIRLTYRNSPVLQPVTLAEDPGRTNIGAAVLSPLGGLLFAAVIETRNKEIKKLMADRQKSRQASRRGERKARQRLAKRYGSMVKSGMVMRKLPMYAADKFVTCKFIRNTQARFCNRKRCPDWITPTVQHLVQTHLNIIRKISRYLPVTDIAFEVNRFAFMHMENPKAMGVDFQNGPLKGYDDVKEAICTQQHGKCLMCKKPISHFHHIVPRSRGGSDTIQNLAGLCPECHTKVHTDTTFRKDFDRKKSGQLKKYGALSALNQAVPFICKKLLEEYGEEHVHFCGGLDTSLIRTALGFEKTKKDQMHEVDAYCVGLAALEVNEVETPAFDHTFQIRQFRRQDRSIIHHQTGRSYYQGKEKVAQNRKPGFEQKTTALSQWYEEQVRIHGEKEAEKLRSQLRVEKSCRHYNDMDRFLPGAVFLYEGKRYVLSGRITNGKYLRACGQGMKKFPCCRVYVHPA

SEQ ID NO: 19917 - protein, 410 aa, unidentified
IEICEDVGYNYIGISVKSQSHEYVSAQYDTLQDEKSCHDACRRMRRTRRNRLRYRQKRFDNRKRDKGWLAPSLKHKKELNVNVIKMYCEVVPITHATVEVGSFDTMLVKAIEEGKATPEGADYQKGPRYNLATLREAVFYRDNYTCQVCGREASEGAILHMHHMFYWKGRHGNSLNELLTVCEKCHTPANHQKGGKLYGFGEDIKFANLSGAAFMNTVRWQIVNELYAAFGKPFVTFTYGAMTKEKRIALHLEKSHNNDAYAMGEFHPNCRCTFEHYEKVRRNNRILEKFYDSRYIDIRTGEIATGKELFNGRINRSHKKDSENLHKYRGKRIRKGYRALRRKKVALNPGDLVSLNGEILTVHGTHTKKNGSVNVEFKTPSKSGKKSTSLKKLKIIKTISPMRSAWDKVS

SEQ ID NO: 19918 - protein, 502 aa, unidentified; identical to SEQ ID NO: 2616

SEQ ID NO: 19919 - protein, 334 aa, unidentified
VGRDSVAYSKPPINIDEGIILRLVWPAYRSNTPIERNLYHGICSSKRWTTIDAKRNRYGKVYRMLRSGMAVVVKKCPFTIQLQYESERNVQPVALGIDAGSKHVGVSATTKAKVLYESDVELRGDIVKLLATRRQLRRSRRSRKTRYRPARFDNRKRKNGWLAPSIRQKIESHLTVVANVCKILPVSRIIVETASFDIQKIKNPDIQGTEYQQGEQMDFWNVREYVFFRDGHTCQCCKGRSKDKILNVHHIESRKTGGNAPNNLITLCETCHKGYHNGIVTLPKNIKRGMKFKDAAFMGIMRWTFYNTLKEQYEPDIPVSMTYGYLTKQYKDLP

SEQ ID NO: 19920 - protein, 447 aa, unidentified
MVTVQQSTHHLLFSRVFIRMNLFMVYVISQDGKPLMPCSNPIARLLLKQGKAKVKKREPFTIKLTYETTNYVQDLTLGVDTGSGTIGTAVGKDNGDIVYMSEVTVRNDITGKMTQRAKYRRNRRNRKTRYRKSRWLNRANSIKKDRFSPTMQSKFHSHVKEIEYIKSILPITEMVFETGQFDTHLMKNPSLSNPKVKHWGYQKGTNYGFENTKVFVLNRDNYTCQCCKGKHKDSKLEVHHIVFRSQGGSDEESNLITLCHTCHKDLHSGKINPKLSGKVKGNLKYATQMNSIRKQLFRLYPNAIETFGYVTKANRLHLGVDKEHYYDACTIATQGNAFNVKSNLYKKKCVSDGDFQKTKGIRSEQPVVTDKICGFRKFDKVRYFGNDYFIKGRMSTGYAILMDIDGNKIDFSAMPKGYKTPKMVNLKRLEARSTWMITTVEVTPNIA

SEQ ID NO: 19921 - protein, 441 aa, unidentified
MKVCVLHQDGQPLMPTTPRKARRLLEAGQARIVARTPFTIQLLYPSRCSTQPITLGVDAGYATVGFSAVTDKEELVGGELKLLVGMSARLAERAMYRGGRRCRTRHRKPRFDNRRRAEGWLVPSIQHKLDSHLRLIDRLCAVLPVTRIVIEVASFDIQRLKNPDIEGEMYQQGELAGFWNLREYTRSVHRDGHTCQNRQCPNRAKEKVLQVHHLGYWRGDGSDRPANLITLCTRCHTSENHQPGGFLWGWQPNLKSFRPETFMSMVRWRLVEAVGAEATYGYLTKSRRIELGLPKSHTHDAFVIAGGRTQGRATPLLLEQVRRNRRALQIWYDAKYIDIRTGEVVKAQVLNNGRRTRNRNLGGENLRRYRGPKVAKGRVSIRRRRYPYQPGDLVRYEGQVYRVQSMGGYGRNLKLAGRPKEVKAPLVSPVRWRKGICQQVP

SEQ ID NO: 19922 - protein, 496 aa, Streptomyces sp.; identical to SEQ ID NO: 4777

SEQ ID NO: 19923 - protein, 414 aa, unidentified
MPCSPAKARLLLKEKKAIVVRRTPFTIQLTIATGETKQPVSLGVDAGYKHVGLSASTEKAELYASEVELRQDITDLLSARRALRQSRRNRKTRYRAPRFDNRIRTKRKGWLAPSVENRIDAHLSRIEAVLRLLPVTKITVETASFDLQLLKNPDISGKEYQEGEQLGFWNIREYVLCRDGHVCQHCYGRSKDPVLNVHHLESRRTGGDSPGNLITLCETCHKALHRGEITLKAKRGQSFRAEAFMGIMRWEVHNRLRALHPGIEVSNTYGYRTKHARIANGIAKSHCADAFCIAGNLGAERLCEFFFQKQTRRNNRQIHKLSILKGGIRKRNQAPFEVKGFRLFDKVACQGEEGFIFGRRSSGFFDVRKLDGTRISAGISCKKLHLLEKRRTYLTEIRKEEALPPLPEGRGLRA

SEQ ID NO: 19924 - protein, 451 aa, unidentified
VLSAWNPFQHWRRITTGRKTEETNLRVLVWNKRGKPLMPCSPAKARLLLREKKAIVVRRTPFTIQLTIATGETKQPVSLGVDAGYKHVGLSASTEKAELYASEIELRQDITDLLSARRELRRARRNRKTRYRAPRFDNRIRTKRKGWLAPSVENRINAHLSRIEAVLRLLPVTKITVETASFDMQLLKNPDIAGKEYQEGEQLGFWNVREYVLFRDGHVCQHCHGRSKDPVLNVHHLESRRTGGDSPGNLITLCETCHKALHRGEITLKAKRGQSFRAEAFMGIMRWEVLNRLKASHPELEVNNTYGYRTKHARISNGIAKSHCADAFCIAGNLGAKRLGEFFFQKQTRRNNRQIHKLSILKHGLRKRNQTPFEIKGFRLFDKVACKGEEGFIFGRRSSGYFDVRKLDGTRISAGISYKKLHLLEKRQTYITEIRKEKALPPLPEGGGLRA

SEQ ID NO: 19925 - protein, 544 aa, Streptomyces sp.; identical to SEQ ID NO: 10849

SEQ ID NO: 19926 - protein, 422 aa, unidentified; identical to SEQ ID NO: 13732

SEQ ID NO: 19927 - protein, 415 aa, unidentified; identical to SEQ ID NO: 3582

SEQ ID NO: 19928 - protein, 469 aa, Nitrospira sp.; identical to SEQ ID NO: 15405

SEQ ID NO: 19929 - protein, 492 aa, Selenomonas sp.; identical to SEQ ID NO: 11943

SEQ ID NO: 19930 - protein, 426 aa, unidentified
MVYVQNHLGQPLMPTQDHRKVRLLLKAGAAVVVRRTPFTIRLTTRTKTYVQPVILGVDTGSKTVGMSAATHEEEVFAAELTPRNDVVKNLADRRKFRSSRRGRTTRYRQPRFNNRVHSKHKGWLAPSVEVKIQEHITSIKRACELLPIGKVVVETAEFDLQLLKSIADGMPVPQGEDYQKGEMYGFYNVRQYVFFRDGYTCQCCGAHGKGIKFHTHHLESRKTGGNAPDDLVTVCDKCHKAFHAGLITDAKLKKRRRKSTRDAAFMGIMRKTLLQRLRAELPIPVVETRGYITKATRERLLKLPKSHTNDALAIAMGRHGFGIKEVTYMPQSDRIYQIKPVRHHNRQLHKALPKKGGRRQRSQGPKYVQGFRRFDKVLYRGQECFIWGLRTRGYFQLKLLNGTKVHESAKASELILLEHRSGYLIA

SEQ ID NO: 19931 - protein, 426 aa, unidentified
LRVFVLNKRGKPLMPCSPAKARLLLKEKKAIVKRRTPFTIQLTIATGETKQPVGLGVDAGYKHVGLSASTDKAELYASQVELRQDITDLLSARRALRRARRNRKTRYRAPRFNNRIRTKRKGWLAPSVENRINAHLSRIEAVLRLLPVTKITVETASFDMLLLKNPDIAGKEYQEGEQLGFWNVREYVLFRDGHVCQHCYGRSKDPVLNVHHLESRRTGGDSPGNLITLCETCHEALHRGEIALKTKRGHSFRAEAFMGMMRWEVLNRLKASHSELEVNNTYGYRTKHARIVNGIDKSHCADAFCIAGNLGAERLCEFFFQKQTRRNNRQIHKLSILKGGIRKRNQAPFEIKGFRLFDKVACKGEESFIFGRRSSGYFDVRKLDGTRISAGISYKKLRLLEKRRTYLTEIRKEEALPPLPEGRGLR

SEQ ID NO: 19932 - protein, 442 aa, unidentified
MVYVLNKDGQPLMPTSRHGKVRRLLKTNKAKVVKRCPFTIQLLYDTANHTQNITLGVDAGSKHIGLSATTEDKVLFEADVELRNDISRLLEARYTFRRSRRNRKTRYRKKRFDNRVSSKHKGWLAPSIEHKIQSHFAMVEKVHRILPVTKIVVETASFDTQLLKAQLEGKPIPHGTDYQNGELAGWNIREYIFHRDNYTCQWCKGKSKDPVLVTHHHAYWKGDHTSKPSSLITLCNTCNDSKYHKKEANRLWGWEPKVTNSYKHAVFMGVMRWTFYNRLKEIYPNVSMTYGYITKNTRIENNLPKTHYVDARCISGHPEAKSSGEYFYYKKVRCHNRQLHKANTLKGGIRKRNQAEYTVKGFRLFDRVEYKNNEYFVFGRRTSGFFDIRTLDGQKVNKGSISFKKLKLKETSKTYLIERRMADTGVSLATLTTEVTSLRQTD

SEQ ID NO: 19933 - protein, 445 aa, Myxosarcina sp.
MSNYIFVIDTNFQPLNPIHPARARKLLKAGKAAIYRKYPFTLVLKKAVEPKEIKQCQLKLDPGSKTTGIVLLQKNKLIWAAELTHRGQRIKNALESRRSFRRGRRNRKTRYRQPRFLNRKRSDGWIAPSLKHRVLTTMTWVKRLIKRCPIKFIAVELVRFDTQKLQQPEIEGAQYQQGTLYQYEVKEYLLEKWSRTCAYCDAKNVPLEVEHIVPKSRGGSNRVSNLTLACVPCNQAKSNRDIKDFLADKPDLLSKILKQVLAPLKVRNAPPGKLLSSTQENLADAAAVNSTRWKLFEALKTTNLPVTTGTGGQTKFNRTQQNLPKTHWLDAANVGETPQLKILTSQPLLITAKGHGIRQRAITDKYGFSKRHRGRFKLSHGFKTGDIVKANIPKGKYAGHYNGLRIAIRTKPTFALSPQNGGKQFDAHCKYLINIHKADGYSYSY

SEQ ID NO: 19934 - protein, 444 aa, unidentified
  source 1..444: note = Microcoleaceae bacterium UBA10368
MSKTPNQVFVLDNSKKPLTPCLPVIARKLLNAGKAKVFRLYPFTIILKKTVDEQPEPIEIRIDPGSKTTGLALVSLTQVIWGAELTHRGHAIKSRLETRSAIRRSRRHRKTRYRQPRFLNRTRPKGWLPPCLEHRVLTTITWVNRLCKLAPIKSIAFELVNFDTQKMQNPEVSGVEYQQGELQGYEVREYLLEKWNRKCAYCGAEKLPLQVEHINPRASCGSNRVSNLCLACKKCNTKKGTQDIKDFLKGKPEILKRIMSQAKAPLKDAAAVNGTKSALLQALKATKLEPIYVGRGSLTKFNRTKLGLPKAHWIDAACCGDVTQGLTLAINQPLLIKAMGWGSRQVVQTDKYGLTRKGYQPKQKVKGWNTGDMISVIGGKHEGVKCKGIKTTRFKGNFDIRVNDTTVISVSRNQIKPVYRNDGYNYSFVGNCREMSEKRVRAIG

SEQ ID NO: 19935 - protein, 395 aa, unidentified
MDTGYLHIGTSVKSEKHEYLGVQIDTLTDEKQKHDACRMYRRQRRSRKRYRQSRFNNRKRSDGWIAPSLEHKKDIHIQTISRICNAMPITNITLEMGNFDTQVLKALEENRPLPQGTDYQHGERYGIATLREAVFARDKYTCQCCRKTIADGAILHVHHIIYRSRGGTNRMSNLATVCDRCHTPANHKPGGRLYNWKPKIASFKGATFMTAVRWKMYNEVKSKFSDINIHITYGAETKEQRRAFDITKSHVNDALVMGQFHPKHRSRPVCYKKKRRNNRCLEKFYDAKYIDSRDGKKRSGQELFNGRINRNHKKDSENLHQYRQQKVSAGRRTIRKQHYSIQPHDIIVFNRQQFETSGCHCNGARAILLPQKKSVAIKKLSIHKYAGGYFKSDFT

SEQ ID NO: 19936 - protein, 415 aa, unidentified; identical to SEQ ID NO: 7357

SEQ ID NO: 19937 - protein, 417 aa, unidentified
MPCSPAKARLLLKEKKAIVKRRTPFTIQLTIATGEAKQPVALGVDSGYKHIGLSATTEKAELYASEVELRQDITDLLSARLALRRSRRSRKTRYRAPRFDNRVASKRKGWLAPSVENRIAAHMSRVEAVMRVLPVTAITVETAAFDTQLLKNPDIAGEAYQQGEQLGFWNVREYVLFRDGHVCQHCRGKYKDPILNVHHIESRRTGGDAPNNLITLCETCHKAFHRGEIKLKVKRGKSFKAETFMGIMRWTLFERLKKAHPELRVRNTYGYLTKHKRISHGIAKSHCADAYCIADNLGAKRLEGFFFQKQTRKHNRQIHKLSILKGGLRKKNQAPYEVKGFRLFDKVICKGEEAFIFGRRTSGSFDVRRLDGTRISAGINYKKLRLLEPRTTYLTEFRKEAALPHLHECSGSRAEFR

SEQ ID NO: 19938 - protein, 431 aa, unidentified
MDAWDIIVILNKRGKPLMPCSPAKARLLLKEKKAIVKRRTPFTIQLTIATGESKQPVTLGVDAGYKHVGLSASTEKAELYASEVELRQDVSDLLSARRALRQSRRSRNTRYRAPRFDNRIRTKRKGWLAPTVENRINVHLSRIETVLRLLPVTKITVETASFDTQLLKNPDIAGKEYQEGEQLGFWNVREYVLFRDGHVCQHCHGRSKDPVLNVHHLESRRTGGDSPGNLITLCETCHKALHRGEIKLKAKRGRSFRAETFMGIMRWGVLNRLKASHPKLEVHNTYGYRTKHARIANGIAKSHCADAFCIAGNFGAKRLGEFFFQKQTRRNNRQIHKLSILKGGIRKRNQAPFEVNGFRLFDKVACKGEEGFIFGRRSSGYFDVRKLDGTCISAGISYKKLHLLEKRRTYLTEIRKEEALPPPPEGRGLRA

SEQ ID NO: 19939 - protein, 465 aa, unidentified
MSTCACVLSKNGERLMPTIRLGKVRHLLKDGKAKIIKHHPFTIQLLYDSETNIQPIEICEDVGYNYIGISVKSQSHEYVSAQYDTLQDEKSCHDACRRMRRTRRNRLRYRQKRFDNRKRDKGWLAPSLKHKKELNVNVIKMYCEVVPITHATVEVGSFDTMLVKAIEEGKATPEGADYQKGPRYNLATLREAVFYRDNYTCQVCGREASEGAILHVHHMFYWKGRHDNSLSELITVCEKCHTPANHQKGGKLYGFGEDIKFANLSGAAFMNTVRWQIVNELYAAFGKPFVTFTYGAMTKEKRIALHLEKSHNNDAYAMGEFHPNCRCTFEHYEKVRRNNRILEKFYDSRYIDIRTGEIATGKELFNGRINRNHKKDSENLHRYRGKRTYAGHRALLRKKVNLNPGDLVSLNGEVLVVHSTHTNKKGAVNVEFKTPGKSGQKSASLKKLKIVKAADSMHSAWEKIS

SEQ ID NO: 19940 - protein, 414 aa, unidentified; identical to SEQ ID NO: 3491

SEQ ID NO: 19941 - protein, 570 aa, Streptomyces sp.; identical to SEQ ID NO: 11497

SEQ ID NO: 19942 - protein, 466 aa, unidentified
  REGION 1..466: note = IscB polypeptide
MQKLSVELNNAPMDTSLVHCSTNPVLNREETLSVQDTVLADNNSEENLRLPVGGHKATTLVYVLNKNGNPLMPCSPTKARHLLGKNKAKVVRCSPFTIQLLWDCEENVQTITLGIDPGYNCMGFSAISSKKELISGEVQLRKDVSKKLTKRRMYRRNKRSKLWYREPRFNNRKKIEGWFAPSIQYKLDSQIRLIDKIKKLLPISEMIIEVTSFDTQKMQNPEISGIEYQQGELQGYEVKEYLLEKWGRKCVYCNKTNIPLEVEHIIPKSREGTNRVSNLTLSCSKCNLKKGNKTAKEFGHPEIQKKADETLKAAAFMNIVRWKLIDMLNCNWTYGYITKYNRIKFGLEKSHINDAFIIAGGNGQQRTLEYRINQIRRNNRCLQLNRKGFAPSIRRRRYNFQPHDLVRYINRIYEVKGMFNKGKYIRLKAEYRDINTKIENIRLYQYKKGWQFISALTDGVFLPIFK

SEQ ID NO: 19943 - protein, 517 aa, unidentified
  VARIANT 360: note = X can be any naturally occurring amino acid
MLPQSRALEAADADNREGQDETVGGKGAIPKPVANISEGRRFERSALRPQGQNNVRFDGGFVQVFVLDKKKKPLMPCHPARARELLREGRAVVHRIAPFTIRLKDRIGGETQPIRVKLDPGSKTTGLAAAREEETDGEKTAHVLFQAEIHHRGSAIKKKLDQRRAFRRRRRSQLRYRTPRFDNRTRPDGWLPPSLRHRVDTTLAWVERLRRLVPVSELSQELVRFDMQKIENPEISGIEYQQGTLAGYEVREYLLEKWGRTCAYCGSENVSLEIDHIHPRSLGGSDRVSNLTLACRSCNLKKGNRPVGEFLAKTPERLSTILARAKAPLKDAAAVNTTRWALFQALKATGLPVEVASGGXTKYNRTRLGIPKGHSLDAACVGKVDRIEGWNRPCLSIKATGRGSYQRTRLDAFGFPRGSLTRTKAHFGFQTGDRVLAIVTKGKKTGTYAGRVAVRSSGSFNIQTGSRVVQGISYKDCRLLQRADGYGYSIHPITEKGEAGEALPLPGMNAGVSRARG

SEQ ID NO: 19944 - protein, 544 aa, unidentified
MKQKKQKVMVYILNKKGKPLMPTIRCGHVRKLLDSKKAVVVNSNPFTIRLKYDTPNGIQDVFAGIDSGRENIGSGASNEDGDCLYLGELKTSNKSIKLKMTERAGFRKERRRHDRQNKQRKARKDHTEIQNGNDDICRTTISCKSVQISYPVAEESVTHKIIRGKEGKFANRHRDEGWITPSARQLVQMHMNDLKSMCKILPINHVTLERVAFDFQKLENENIKTWEYGKGKLYGYDSPEEYIHDVQNGKCLVCGKPHIDYLHHIIPRSKGGSDKVSNIAGLCYDCHYGPMGVHNCQNTQDRLPELKSEANKQYKVSLLNSVMPVLIEEMDKFCKANSIMFSICEGHDTAKVRDMYDLQKDHCIDGFAISLVDRNVKSVDVMPDRIYQKQRYKKKSKNIIQKRNCREYYDDKKLVAVNRHKGTDQKADSLEEYMNTYAETHTTDECKKHFDSLVVKPARRTYTFHKEWRICPFHIGDKVRYEKKNKIKGNTKVETFICESIHFYKDENKAKVEHNKTKSKRMKFCRVLESGCTPYVDYRKLALM

SEQ ID NO: 19945 - protein, 442 aa, unidentified; identical to SEQ ID NO: 2903

SEQ ID NO: 19946 - protein, 415 aa, unidentified; identical to SEQ ID NO: 3582

SEQ ID NO: 19947 - protein, 413 aa, unidentified; identical to SEQ ID NO: 5965

SEQ ID NO: 19948 - protein, 420 aa, unidentified
MQYVYVLNKHGEPLMPCSPGKARLLLKQQKAHVIKRTPFTIKLLYGSTGYKQPITLGVDAGSKHVGLSASTEKRELYREEFTPRNDVVDLLSTRKQYRRSKRYRKTRYRAPRFDNRIHNKHKGWLAPSVEVKIQEHITVIKRICRILPVALVRVETAEFDTQRLKAMLEGKPLPVGTDYQLGEMYDEYNVRQYVLKRDNYTCQCCGAHTTAKKAVKLHVHHLESRKMGGNAPGNLITLCITCHDALHKGKVSLDNKKRGKPMRDAAFMGIMRKTLMSRLREELPITVQGTYGYITKMRREQNNIKKSHVNDARCISKHPLAEPCSVCYRTKAIRHHNRQTHKANFSKGGIRKRSQMPYVVEGYRLWDKVLYKGQECFVSGRRTSGSFTLKKLDGTRISKGVTFKKLRLLEPATNYLIERM

SEQ ID NO: 19949 - protein, 424 aa, unidentified; identical to SEQ ID NO: 3232

SEQ ID NO: 19950 - protein, 447 aa, unidentified; identical to SEQ ID NO: 5316

SEQ ID NO: 19951 - protein, 451 aa, unidentified
MKVFVKNMRGQALMPCSPRKARILLRQKKAKVVDYRPFTIQLCYPTGEAKQEVIIGIDQGARHIGIAVFSQGKILAKGEVELRQDVHSLLQTRAEYRRGRRYRKTRYRKARFLNRIRPEGWLPPSIQEKLNANFAWIDKFCSLVPDSKLRIEVGKFDTAKMINPDIKGVDYQHGQTYGYYDVRYFVFARDNYTCQVCHKKNKILHTHHIIYKSKGGSDRADNLITVCTECHTHENHQEDGILYQWMLKHKKTRQYKEPSFMNILRIRTYKKYSEADITYGSVTTERRKALRLEKTHYNDAIAITGIDKVEENIDECFWIKQLRKRKRSLHEATPRKGRKEKNTEAKRNSKNTKQVNGWYLNDEVICYGRRGWITGFNSATSSSPAAFVVDKDGNYITVPEKKYKQVSLKLLKLVRHNNNWQYVVTKEEKSAASSEIPHPPIEVSESFLAAC

SEQ ID NO: 19952 - protein, 469 aa, Microcoleus sp.; identical to SEQ ID NO: 19521

SEQ ID NO: 19953 - protein, 418 aa, unidentified; identical to SEQ ID NO: 6419

SEQ ID NO: 19954 - protein, 411 aa, unidentified; identical to SEQ ID NO: 8372

SEQ ID NO: 19955 - protein, 414 aa, Scytonema sp.; identical to SEQ ID NO: 7784

SEQ ID NO: 19956 - protein, 424 aa, Moorena sp.; identical to SEQ ID NO: 7692

SEQ ID NO: 19957 - protein, 414 aa, unidentified
MPCSPAKARLLLKEKKAIVVRRTPFTIQLTIATGEAKQPVSLGVDAGYKHVGLSASTEKAELYASEVELRQDVSDLLSARRALRQSRRSRNTRYRAPRFDNRIRTKRKGWLAPTVENRINVHLSRIETVLRLLPVTKITVETASFDTQLLKNPDIAGKEYQEGEQLGFWNVREYVLFRDGHVCQHCHGRSKDPVLNVHHLESRRTGGDSPGNLITLCETCHKALHRGEIKLKAKRGRSFRAETFMGIMRWGVLNRLKASHPKLEVHNTYGYRTKHARIANGIAKSHCADAFCIAGNFGAKRLGEFFFQKQTRRNNRQIHKLSILKGGIRKRNQAPFEVKGFRLFDKVACQGEEGFIFGRRSTGYFDVRKLDGTCISAGISYKKLHLLEKRRTYLTEIRKEEALPPPPEGRDLRA

SEQ ID NO: 19958 - protein, 406 aa, unidentified
MRGKPLMPCSPAKARHMLKAGKAVVVRRTPFTIKLTIATGETKQDVTLGVDAGARHVGISATTEKEEVFASEVKFRQDITGLLADRLAFRRARRNRKTRYRAPRFNNRVRSKHKGWLAPSVENRIQAHISRIEAVCRLLPVTKIVIETASFDIQKIRNPEVEGTGYQQGDQLGFWNVREYVLFRDGHICQHCRGRSKDPILNVHHLESRKTGGDAPNNLITLCETCHKAYHAGKIKLKVKRGQSFRAEAFMGIMRWTLLDRVRKTHPKLPVENTYGYLTKHKRIALGLPKTHCADAFCIAGNLKALRRGDFLFQQQTRKHNRQIHKCSILKGGVRKLNQAPFLVKGFRLFDKVRIGGQIGFVFGRRVRGTFNIRRLDKTVIGTDINCKKLSLLETRKTFLTELRKE

SEQ ID NO: 19959 - protein, 425 aa, Nodularia sp.; identical to SEQ ID NO: 3165

SEQ ID NO: 19960 - protein, 512 aa, unidentified; identical to SEQ ID NO: 7699

SEQ ID NO: 19961 - protein, 468 aa, unidentified; identical to SEQ ID NO: 16431

SEQ ID NO: 19962 - protein, 415 aa, Bacillus sp.; identical to SEQ ID NO: 2431

SEQ ID NO: 19963 - protein, 423 aa, Moorena sp.
MRVFVLNKNRQPLDPCKPARARILLSTGKAKVYRRYPFTIILTEEINEPITHEHQLKIDPGAKTSGLAIVQVKRVIWGAELTHRGFQIREALSSRRQLRRSRRNRKTRYRKPRFLNRTRPKGWLAPSLTSRVQNILTWVKKLIRFCPITGISQELVRFDSQKLQNPEISGIEYQQGTLYGYELREYLLEKWNRKCAYCGATGTQLEIEQIKPKSKGGSNRVSNLTIACHPCNQAKSNQDIELFLSKKPSILKRILSQSKRPLADAASVNSTRWKLYYELKSIGLPVEVGSGGLTKFNRCRQNLPKTHWLDAANVGKVETLIIEVTLPLAITAKGHGTRQLCRTNKYGLPIRHCSRIKFHKGFQTGDLVRAVVTKGKKIGTYVGRVATRKSGSFNISTKSGLVQGISHKYCQFIHTKDGYAYTN

SEQ ID NO: 19964 - protein, 442 aa, unidentified; identical to SEQ ID NO: 4522

SEQ ID NO: 19965 - protein, 420 aa, unidentified
MQYVYVLNKHGEPLMPCSPCKARLLLKQKKACVVKRTPFTIKLLYGSTGYKQPITLGVDAGSKHIGISATTEKYELYREEATPRNDVVDLLSARRAFRRSRRNRKTCYRAPRFNNRVHSKHKGWLAPSVEVKIQEHITLIKRVCRILPVTLVRVETAEFDTQRLKAMLEGKPLPVGTDYQLGEMYDEYNVRQYVLKRDNYTCQCCGAHPAKIKAVKLHVHHIETRRTGGNAPNNLITLCTACHKALHAGKVTLDGRKRGKPLKDAAFMGIMRKTLMERLCKELKISIQGTYGYITKYLREKHDIPKSHTNDARCISRHPLAVPCDACYYTKAVRHHNRQLHKATILKGGIRKANQAPYMVKGYRLWDKVSYNGTECFITGRRTSGYFALKKLDGTVVSNSASYKKLRLLEVATNYITERR

SEQ ID NO: 19966 - protein, 417 aa, unidentified; identical to SEQ ID NO: 14385

SEQ ID NO: 19967 - protein, 422 aa, unidentified
MLVYVISKDGQPLMPISRCGKVRRLLKSKRAKVIKRCPFTIKLLFEPENDFVGECYCGVDTGSKHVGIAVVSNDRVLYQSQIELRDDIKRKMEQRRMFRRNRRSRKTRYRKTRFLNRANSTKPNKLPPSVKHKVQAHIDEIEFCNKILPVSNLILEVSQFDAALMKNPSLMNEKVKHWGYQQGFNYGYSSRRSAILHRDNYTCQCCGKKNCRLEVHHIKFRSNGGTDDEENLITLCKECHNGIHAGIAVLNKKPKKSKSLKHATHMSIIRSRLLKKYPDAIETFGFVTSENRNHLNLPKDHYIDACVIASGGLHFELSDVLYQKRRVSKQDRQLCQGMHGERKIPTWKILGFKKFDLVEYMGELCFVKGRRSSGSFVLMDINRRLIDFRDRGGKQNPSYKSLKRVSARRSILCISKKNREIR

SEQ ID NO: 19968 - protein, 427 aa, unidentified
MLVYVLKQNGQPFMPTERFGKVRRLLKEGKAKVVRREPFTIRLLYEPETDVVQECYCGVDTGSKHIGVACIGNDKILYQSQVELRNDIKKKMDSRRMYRRTRRSRKTRYRKARFLNRRNSIRKDRLPPSVKHKVQAHIDEIEFCKKILPVSNENLILEVSQFDTALMKNPSLMIEKIKHWGYQKGFNYGHSSRRKAVLHRDNYTCQCCGKKNCQLQTHHIIFRSRGGSDDENNMITLCKECHKGVHDGTIVLDKKPKKGKNLKHATHINIIGSGLLKKYPQAIETFGFVTSENRNHLHLEKDHYIDACVIASGGLKFRELNVIFYKQRVSKGDYQLCKGVRGEIKIPNGKIFGFRKFDKVKYLEKEYFVKGRMSRGGYVILMNIFSEKVDFSSMPKGLKTPKLSNCSRISARRSCLCIRKKITLNIV

SEQ ID NO: 19969 - protein, 436 aa, unidentified; identical to SEQ ID NO: 12564

SEQ ID NO: 19970 - protein, 462 aa, unidentified
MSVLVIGRNGRALMPTNPRKARLLLKKKTASVVCRHPFTIQLLYKTGCATQEGCIGIDTGSQHIGVGITCGDRVILKDEHALRSSMEKRSLLATRAVMRRGRRYRKVRYRKPKWRHHTKRMYFEKANRRGQHWRKVKTTTQSPRLKGWLPPSLQSKCDHHFRIIDRYLKYLPDPITRNLVIEAGRFDMARMNDPTIHGEMYQRGPMYDAENLRAYIFARDNYQCACCKAKAGTTRKADGTTVKLVAHHILFRSRGATDNPKYIISVCDHCHTTKAHQPGGILYSWMENNKKVARGSRDATFMNILRKRLFARYPQAAFTYGNITAADRKQLRLPKSHANDAVAISLFGKEASTVKNICQTMHYKQIRKSKRSLHEAIPRKGRKNPNTKAVRNKKNTTQVNGFKLWDSVLADGKKLFICSFTGTSAYLIDKNGCYISQPGKTYKQWPLSKLKRLHPNGNWLMA

SEQ ID NO: 19971 - protein, 340 aa, Anoxybacillus sp.
MVFVLDTNKRPLAPCHEAVARKLLKQGKAAIYRRFPFTIILKKSVDESEIKATYRLKIDYGSRHTGLAILRGQEVVWLGQLDHRTDIKERIDKRRAFRRARRNRKTRYRKPRFLNRRRKDGWLPPSLESRVQNIQTWVNRLKKLCPIGYISYENAKFDTQLMRNPEINGVEYQQGTLQGYEVREYLLEKFGRKCCYCGKENVPLEVEHIIPKSRGGTDRVDNLCLACHDCNQRKGSKTAEEFGYPHIQKQVKESLKDTSAINSTRWKAYEVLKQTGLDVECGTGARTKMNRIRLDLPKTHYFDACCVGESTTNHLYFKTKEVLFIKAKGRGSRSRTNLDR

SEQ ID NO: 19972 - protein, 431 aa, unidentified
MPNKVYVINKHGRPLMPCSPAKARHLLDAGKAKVKKRTPFTIQLVYGSSGYTQEVILGVDAGSKTIGMSASTTKEELLSAEVKPRNDVVDLLSTRREFRRARRNRKTRYRKPRFDNRVRSKHKGWLAPSVEVKIQEHITAIRRVCGILPVSKVVIETAEFDLQLLKAIADGKPVPQGEDYQQGEMYGHYNVRQYVLWRDGYTCQCCGAHATKKKEVRLHVHHLESRKVGGDAPDNQVTLCESCHEKLHKGLIAEKDFKKRKRKSTRDATFMGIMRKTLMQRLCSELPIPVIETRGYITKATREKLLVLPKSHTNDALAIAQGKQGFNVGYLPGIVQINKIYTIRPVRHHNRQLHKATILKGGIRKSNQTEKYVFGYCLFDKVQFNGQDCFIWGRRTTGIFTIKTINGKMIKDGISFKKLKLAEKSTSYLIA

SEQ ID NO: 19973 - protein, 415 aa, Bacillus sp.; identical to SEQ ID NO: 6255

SEQ ID NO: 19974 - protein, 489 aa, unidentified; identical to SEQ ID NO: 15226
  source 1..489: note = uncultured beta proteobacterium

SEQ ID NO: 19975 - protein, 493 aa, unidentified; identical to SEQ ID NO: 2644

SEQ ID NO: 19976 - protein, 442 aa, unidentified; identical to SEQ ID NO: 2903

SEQ ID NO: 19977 - protein, 408 aa, unidentified; identical to SEQ ID NO: 5302

SEQ ID NO: 19978 - protein, 414 aa, unidentified
MPCSPAKARLLLKEKKAIVKRRTPFTIQLTIATGESKQPVTLGVDAGYKHVGLSASTEKAELYASEVELRQDGSDLLSARRALRQSRRNRKTRHRAPRFNNRLRTKRKGWLAPSVENRINAHLSRIEAVLRLLPVTKISVETASFDMQLLKNPDIAGKEYPEGEQLGFWNVREYVLFRDRHVCQHCYGRSKDPVLNVHHLESRRTGGDSPGNLITLCETCHKALHRGDITLKAKRGKSFRAEAFMGIMRWEVHNRLRALHPGIEVSNTYGYRTKHARIVNGIAKSHCADAFCIAGNLGAERLCEFFFQKQTRRNHRQIHKLSILKGGIRKRNQAPFEVKGFRLFDKVACQREESFIFGRRSSGFFDVRKLDGTRISAGISCKKLHLLEKRRTYLTEIRKEEALPPLPEGRGLRA

SEQ ID NO: 19979 - protein, 537 aa, unidentified
MRWLAASKIRTRIFGKEAQQMPSIPVISKDGHPLMPCHHIPVISKDGHPLMPCHHYGRVKRWLKQGKAVIRSRWPFVVQLCYDVEMEPSEGSILGLDPGRTNIGLCAIDRQGRVLFSADCLTRNKDVPKLMGNRAAHRHASRSGERKARQRIEARLHPESKVTETWRKLPGCRKFVRCKVIRNTEARFSNRKRPAGWLTPTANQLLETHLNLARKLQRFLPIQSFAVEINRFDFARMENPGIRNWEYQRGRLAGYSTRNEAVDARQEGRCLLCGRPQIDEHHHAVWKSEDGSESIDNIAGLCAKCHEKVHDSVEMQAKLRAKLKGQTKKYGALSVLNQIMPKLLKKLSTILPTYVTTGYETAQTRREYGLPKSSGSSGHYVDAWCIAATQADAVKGMPELDEPTTHVRQFRRHDRAIIKAQTERAYLLDGKVVAKNRHLRTGQVDPKKPADKQVYSLAEYRRQFPENIGRLEVRASSRRKNNRSRILPGAVFEYEGKQYVLRANQSNGTKFWGIGCQSYAPAKKCRIVLHNTGLVFG

SEQ ID NO: 19980 - protein, 427 aa, unidentified; identical to SEQ ID NO: 18169

SEQ ID NO: 19981 - protein, 515 aa, unidentified; identical to SEQ ID NO: 5111

SEQ ID NO: 19982 - protein, 512 aa, unidentified; identical to SEQ ID NO: 5549

SEQ ID NO: 19983 - protein, 431 aa, unidentified
MPNKVYIINKHGRPLMPCSPAKARHLLDEGKAKVKKRTPFTIQLVYGSSGYTQEVILGVDAGSKTIGMSASTTKEELLSAEVKPRNDVVDLLSTRREFRRARRNRKTRYRKPRFDNRVRSKHKGWLAPSVEVKIQEHITAIRRVCGILPVSKVVVETAEFDLQLLKAIADGKPVPQGEDYQQGEMYGHYNVRQYVLWRDGYTCQCCGAHATKKKEVRLHVHHLESRKVGGDAPDNQVTLCESCHEKLHKGLIAEKDFKKRKRRSTRDATFMGIMRKTLMQRLCSELPIPVIETRGYITKATREKLLVLPKSHTNDALAIAQGKQGFNVGYLPGIVQINKIYTIRPVRHHNRQLHKATILKGGIRKSNQTEKYVFGYCLFDKVQFNGQDCFIWGRRTTGIFTIKTINGKMIKDGISFKKLKLVEKSTSYLIA

SEQ ID NO: 19984 - protein, 406 aa, unidentified; identical to SEQ ID NO: 8042

SEQ ID NO: 19985 - protein, 461 aa, unidentified
MKPDSLRGHSEGIRTTRRLPEFFPKGYSSMNVVYVLSPDRVPLMPCQPVIARLLLKQGKARVKHRTPFTIQLLAQPEQIYTQPLTHGVDTGSSLIGSAVSNVRGSVLYLSEVHVRNDISEMMKERAKKRRNRRNRKTRYRPARWLNRKNSIKQGRFSPTMRSKITAHLREISFVQSLLPITSIVLETGTFDPHALKNPDVLQHKWLYQKGINYSFANTKAYVLTRDGHCCQQCKGKSKDKRLEVHHLVFRSQNGSDEEANLLTLCKTCHDGLHAGAITLHRTGKKRGTLRHATQMNSIRVQLLRQIEAEETWGFVTKEHRILAGLPKEHIFDATMIATRGVKPTFCTTSMLLKRCVSDGDYQQTKGVRSEQRITTDKIRGFRKFDKVRYLGQEYFIKGRMSTGYAILMDLSGNKVDMKPIPKFDKMKRVSARSSWIMIQKIMPNFSYSPISSLSASTRKPF

SEQ ID NO: 19986 - protein, 415 aa, Scytonema sp.; identical to SEQ ID NO: 11291

SEQ ID NO: 19987 - protein, 414 aa, unidentified
MPCSPAKARLLLKEKKAIVVRRTPFTIQLTIATGETKQPVSLGVDAGYKHVGLSASTEKAELYASEVELRQDITDLLSARRALRQSRRNRKTRYRAPRFDNRIRTKRKGWLAPSVENRIDAHLSRIEAVLRLLPVTKITVETASFDLQLLKNPDISGKEYQEGEQLGFWNIREYVLCRDGHVCQHCYGRSKDPVLNVHHLESRRTGGDSPGNLITLCETCHKALHRGEITLKAKRGQSFRTEAFMGIMRWEVLNRLKASHPELEVNNTYGYRTKHARIANDIAKSHCADAFCIAGNLGAERLGEFFFQKQTRRNNRQIHKLSILKGGIRKRNQAPFEVNGFRLFDKVACQGEEGFIFGRRSSGFFDVRKLDGTRISAGISYKKLHLLEKRRTYLTEIRKEEVLPPLPEGRGLRA

SEQ ID NO: 19988 - protein, 396 aa, unidentified
  REGION 1..396: note = IscB polypeptide
MSVFVVDRLYRPLLPTNEARARILLNKGKAVVHTVEPFTIQLKRAIDNPVGEFKVGIDDGAKEVGISVAHENKVVFAGNIKLRQDVHRKMVQRLNFRRARRGRKVRHRKPRFLNRGQKGWISPTIRQKKDSILRVIDDLMKRINITKCVVEQGQFDVSSMSAGYKLTGKEYQLSEYEGNNWRQKVLWRDGYTCQRSGCKSKSRLQAHHIIPRNKVGTNVVKNGLTLCENCHDALHAGEWELKNKQIKQFRYPAHVQQGKWYLFNRLKERFSDVKIYYGWMTAKARRRLNLEKDHHTDASTMIGANDYKCTPYSIKPRRTKIWENNPTRTCFEKNGFRHYDIIKAYHRSKGTVIGSISGLCERYMAIRFENRNNFPVAYKNSKLIFRPNRLVYCQLV

SEQ ID NO: 19989 - protein, 497 aa, unidentified; identical to SEQ ID NO: 11866

SEQ ID NO: 19990 - protein, 431 aa, unidentified
MPNKVYVINKHGRPLMPCSPAKARHLLDEGKAKIKKRTPFTIQLVYGSSGYTQEVILGVDAGSKTIGMSASTKKEEVFAADVTPRNDVVDLMSTRREFRRARRNRKTRYRKPRFDNRVRSKHKEWLAPSVEVKIQEHITAIRRVCGILPVSKVVVETAEFDLQLLKAIADGKPVPQGEDYQKGEMYGHYNVRQYVLWRDNYTCQCCGAHATKKKEVRLHVHHLESRKVGGDAPDNQVTLCESCHEKLHKGLIAEKDFKKRKRRSTRDATFMGIMRKTLMQRLCSELPIPVVKTRGYITKATREKLLVLPKSHTNDALAIAQGKRGFNVGYLPEIAQIDKIYTIRPVRHHNRQLHKATILKGGIRKSNQTEKYVFGYRLFDKVQFNGQDCFIWGRRTTGIFTIKTINGKMIKDGISFKKLKPVEKSTSYLIA

SEQ ID NO: 19991 - protein, 451 aa, unidentified
MWTYHYFVVSCYSLRRVNVVFVISKEGKPLMPTKNHAKVRILLKHKKAKVIRRKPFTIQLLYETTTYTQPITLGIDSGYSYIGFSAITEKEELICGEVKLLQGISERLKERAMYRRQRRSRLRYRKPRFDNRKKCSDWLPPSIQHKFNSHIRFINFLKKILPVTDVVIEVANFDTHKLKNLDVEGIGYQQGEQEGFYNLREYILYRDNYKCQLCGREDLPLEVHHIGFWKQDRTDRPSNLITLCIKCHTPKNHQENGKLWGLEPIQKPFKEATFMSTVRWELVNTLGCKHTYGYITKSKRISLNLEKTHYNDAFCIAGGINQARTKPIIFEQIRRNNRSLEKFYDAKYIDIRTGKVATGQELFCGRRTRNKNYNTENLRKYRGQKISKGQRRIRTQRYFYQPKDIVIYNGKKYVVKGVQNKGNYIKLEKLNKPVKLSLVKPYEFRKGFCVV

SEQ ID NO: 19992 - protein, 460 aa, unidentified; identical to SEQ ID NO: 7594

SEQ ID NO: 19993 - protein, 413 aa, unidentified; identical to SEQ ID NO: 2636

SEQ ID NO: 19994 - protein, 430 aa, unidentified
MPKVYVLNRHGRPLMPCTPAKARHLLDAGKAKVRHRTPFTIQLLYGSTGYTQEVILGVDAGSKTIGLSAATETEELFSAEVKPRNDVVELMSARRQFRRARRNRTTRYRKPRFDNRVRSKHKGWLAPSVEVKIQEHMTAIRRACAILPVSKVVVETAEFDLQLLKAVAEGKPVPQGEDYQKGEMYGHYNVRQYVLWRDSYTCCICGVHGSVRKGVPLHVHHLESRRVGGDAPDNLVTLCTACHDKLHKGIIMAADIKKRKRRSTRDATFMGIMRMTLLRRLREQLPVPVVETRGYITKATRENLLVLPKSHTNDALAIAHGPQGFRAEYLPNIRQADRLYTIRPVRHHNRQLHKATILKGGVRKTNQAEKYICGFRLYDKVLYNGIECFVWGRRTSGSFLLRQLNGEKVKDSVSYKHLKLLERSQSYLVA

SEQ ID NO: 19995 - protein, 512 aa, unidentified
MSTVYVLNKDGKPLMPTTRCGHVRHLLKEQKARVVTSKPFTIQLLYEADDVVQSLCLGIDPGRTNIGVAAVKADGTAVFTAHLETRNKEIPKLMKKRKESRRARRTNGRRCRRQRRAKANGTISKKCVKNDTAQNGSVSKRAKEIGVIKRHLPGCEKDVLCIGIKNKEAKFSNRTRPEGWLTPTANQLLQTHINLVKKIQKFLPISDVVLEINKFAFMRLDNPNVQKWQYQQGPLYQKANLEETVSEMQEHHCLFCKKKIDHYHHVVPQHKNGSNTIDNIIGLCTQHHDLVHKDATWQKRLAKKKTGLNKKYGALSVLNQIIPALTKELSSLFPKHFFVTNGKSTYDYRAAHGVSKDHWLDAYCIACSVLPNDTCDKTINSRVPYELKHFRRHDRRALNNENMSRVYTFNGKMVATNRHKATEQTTDSLEEFRQRQPNDVCNLKVKEHHPTYRNMNRNYPGSVFLVGNQVHVMQGIAGSKDGEATTYKDTNANSIAAGKCKFVAKNSGILFV

SEQ ID NO: 19996 - protein, 425 aa, unidentified; identical to SEQ ID NO: 10000

SEQ ID NO: 19997 - protein, 536 aa, unidentified
VLRPRYQYPTRWYPSREQGSGNGCLSGEENTDLKQEVSGTLSKGDHSHPGEQDFCVPAITIQGGPAMSVFVVGLNGCRLMPTSERKARLLLKHGKASVYRKVPFTIKLNYKTGSTTQSGYLGIDTGSQHIGVSVVREDGTVLHKEEIGLRDSMSKRKLMQSRASSRRGRRHRKTRYRHPKWRPKAKRVYCEIPDRKRRHWKKKEITFTSKRPKGWLPPSLQSKTDHHIRWIKKLQDLLPEGYRLSIELGRFDPARLKDPEIHGELYQKGPQYDYENVRAYVLNRDRYTCQVCGKKGGKLHVHHILYRSYGATDDPQYMATVCSDCHNTENHHQGGILYQWMQKQKKFTRGLRDATFMNILRKRLIEAFPGATFTYGNITKADRERLKLPKSHGNDATAIAIVKTGIMTVKDKEPVIYIQQVRRKKRSLHEETPRKGRKEPNRKASRYDKNTKAVTVTKRKNKKKISITGCLFDRVELNGKKGWISGFTDKSCYVKDENDQYIRTSPKYKQVSLSKLKILHHCGNWAIGARRSLGKG

SEQ ID NO: 19998 - protein, 442 aa, unidentified
MVYVLNKDGQPLMPTNRHGKVRRLLKTNKAKVIKRCPFTIQLLYDTTNHTQNITLGIDAGSKHIGLSATTKNKVLFEADVELRNDISKLLEARCKFRRSRRNRKTRYRKKRFDNRVSSKHKGWLAPSIEHKIQSHFAMVEKVHRILPVTKIVVETASFDTQLLKAQLEGKPIPQGTDYQNGELAGWNIREYIFHRDNYTCQWCKGKSKDPVLVTHHHAYWKGDHTNKPSSLITLCNTCNDSKYHKKGANRLWGWEPKITNSYKHAAFMGVMRWTFYNRLKEIYPNVSMTYGYITKNARIENNLPKAHYVDARCISGHPKAKSSGEYFYYKKVRCHNRQLHKANTLKGGIRKRNQAEYTVKGFRLFDRVEYKNNEYFVFGRRASGFFDIRTLDGQKVNKGSISFKKLKLKETSKTYLIERRMADTGVSLAPLTTEVTSFRQNN

SEQ ID NO: 19999 - protein, 460 aa, unidentified; identical to SEQ ID NO: 8636

SEQ ID NO: 20000 - protein, 419 aa, unidentified; identical to SEQ ID NO: 6954

SEQ ID NO: 20001 - protein, 447 aa, unidentified; identical to SEQ ID NO: 7023

SEQ ID NO: 20002 - protein, 431 aa, unidentified
MPNKVYVINKHGRPLMPCSPAKARHLLDEGKAKVKKRTPFTIQLVYGSSGYTQEVILGVDAGSKSIEISASTKKEEVFAADVTPRNDVVDLLSTRREFRRARRNRKTRYRKPRFNNRVRSKHKGWLAPSVEVKIQEHITSIKRVCRILPVSKVVIETAEFDLQLLKAIEEGKPVPQGEDYQQGEMYGHYNVRQYVLWRDGYTCQCCGAHATKKKEVRLHVHHLESRKVDGDAPDNQVTLCESCHEKLHKGLIAEKDFKKRKRKSTRDATFMGIMRKTLMQRLCSELPIPVIETRGYITKATREKLLVLPKSHTNDALAIAQGKQGFNVGYLPGIVQINKIYTIRPVRHHNRQLHKATILKGGIRKSNQTEKYVFGYCLFDKVQFNGQDCFIWGRRTTGIFTIKTINGKMIKDGISFKKLKPVEKSTGYLIA

SEQ ID NO: 20003 - protein, 414 aa, unidentified
MVYVINKQGQALMPTERFGKVRRLLKNSLAHVVCRIPFTIQLDYDTTDYTQPVSLGVDAGSKHIGISATTSEKELYAADVELRNDIVDKLSTRREQRRTRRSRLRYRKARFNNRVSSKRKGWLAPSVENKIQTHLTIVEKIHKFLPITNIVVETASFDIQKINNPSISGSEYQQGEQLDFFNVREYVLFRDNHTCQHCKGKSKDEVLNVHHIESRKTGSDSPKNLITLCETCHKAYHRGEFKLNVKRGKSFRDAAFMGIMRWSFYDRLKNIYPNVSMTFGYITKNTRITNNLPKEHYVDARCISGNPVAKPLGYYFYQKKVRCQNRQIHKANFLKGGRKKLNQAPFLVKGFRLFDLVEYKKELYYIFGRRSSGSFDIRKLDGTKVNKGSINCRHLRLISTRKSILTEKRMQVNL

SEQ ID NO: 20004 - protein, 493 aa, unidentified
VRNKGNRLIRRHRNMQKLLVELKNTSGDAPQVPCSVSGALNREETLSVPYKVLANNSSDEDLLSGKRGQDLRVPVINMHGKPLMPTRPRKARILLNQEKATVVQRSPFTIQLKYPSGETKQNITLGIDAGYSTIGFNAVTEKKELLSGELTLRKRISKLLKQRRSYRRARRNRLWHRKPRFNNRSKTRGWFAPSIKHKLETHLRLIDRLKNILPITKVIVEVASFDTHKLQNPEIKGVEYQQGELQGYEVREYLLEKWKHKCAYCGKSNLPLEIEHIVPKIRRGSYRVSNLTLACHKCNQKKGNKTAAEFGHSEIQKKAKRALKATAFMNIVRWRLVNTLMCEWTYGYITKHDRIKLGMEKNHINDAFVIAGGKAQERSRSYTLTQTRRNNRSIQLNRRGYKPFIRRQRYKLQPNDLVKYLKTLCRVKGVHNYGKYVIVEGKIGEIFDINVKKVELVKYGKGIQWNTILKEVKKGNSSLLLREMISLPKYYEN

SEQ ID NO: 20005 - protein, 526 aa, unidentified
LLRQERFIVKEVANMSTVYVLNKDGKPLMPTTRGGHVRHLLKEQKARVVRAKPFTIQLLYETNDVVQPLYLGIDPGRTNIGVAVVKANGTAVFTAHLETRNKEVPKLMQDRKKARRARRTNGRRCRRQRRAKANGTISKKCVKQDTAQSKNPSKRAKEIGIIKRRLPGYKKDVLCIGIKNKEAKYTNRTRPEGWLTPTANQLLQTHINLVRKIQKFLPISDVVLEVNKFAFMRLDNPDIQKWQYQQGPLYQKGSLENAVSEMQEHHCLFCDKPIDHYHHVVPQSENGSNTIANIVGLCAEHHNLVHKDAAWQKKLAEEKVGLNKKYGALSVLNQIIPALTNKLSVLFPKHFFVTAGKSTHDYRATHGVSKDHWLDAYCIACSVLPSDVCDSNINNHMPYELKQFRRHARRALNNENMNRVYTLNDKAVAINRHKATEQEAASLEEFRKEHPNDVCKLKVKEHHPTYRNMNRNYPGSIFLVGKHVHIMQGIAGSKDGKATTYKDSNANSITASKCKFVAKNSGILFV

SEQ ID NO: 20006 - protein, 428 aa, unidentified
LKVFVLNMRGRPLMPCSPARARHLLKAGKAVVRRRTPFTIQLRIATGETKQSVTLGVDAGAKHVGLSAATEKEEVFASEVELRQDITGLLAARLSLRRDRRHRKTRYRAPRFLNRVRSKHKGWLAPSVENRIQAHMSRIDAVCRLLPVTRIVIETASFDVQKIRNPEVEGTGYQQGDQLGFWNVREYVLFRDSHVCQHCHGHSKDKILNVHHLESRQTGGDAPNNLITLCETCHKACHAGKIKLKVKRGQSFRAEAFMGIMRWTLLDRMRKAHSGLPVENTYGYLTKNTRITPGLPKTHCVDAYCIAGNLKAVRRGVCLHQRQVRKHNRQIHKCTVLSKTLKDGTKIGYRKLNQTPHLVKNFRLFDKVRCLGQTGFIFGRRSSGYFDVRRLDGVKLSSGISYRKLTLLEKRSTYLTELRKEDGASSPV

SEQ ID NO: 20007 - protein, 493 aa, unidentified
MAVVYVISASGKPLMPTTRCGHVRGLLNEGKARVVEREPFTIQLKYETEEMTQPLYLGIDPGRTNVGAAVVREDGECVFTAQLTTRNKDVPKLMKARKQFRMAHRRLKRRCKRQRRAKGAGTLSQKGEFQRLLPGYEKPILCKGIRNKEARFNNRQRPVGWLTPTANHLLLTHLNMVKKLQKLLPITDVVLEVNRFAFMAMENSNIRRWQYQRGPLYGKGSVEDAVYAQQDGHCLFCGKPIAHYHHVVPQHKNGSDTLENRVGLCNEHHDLVHKDRAWEAKMKETKAGLNKKYHALSVLNQIIPALTEQLAELFPQHAFVTTGEDTADFREDHGIAKEHHLDAYCIACSVLAEPSTVAAPTAKPHRLMQFRRHDRQVCHKENIKRVYLLDGKAVATNRHKAIEQKDDSLEEFCKTHTQQEVSALTVKGHKPIYKEIQRFMPGGVFLFNGKVHTLQGSRGRYKGMPKYYIGTDGEKNHAKRCIFLQQNCGLRWA

SEQ ID NO: 20008 - protein, 520 aa, unidentified
MGDLRNKPVYVQNADGQPLMPTTPARARRMLDQGKARIAIRSPFTIRLLQQIESPQLQPVRVGLDTGSKAMGIAAIANGKAIFVGELPLRQFQKGSAVADRAMHRRARRSRLRYRKARFLNRTRKKCKVCGGNTPKSDRKSGGRAELCRKCAAEGHHAFAGIAKVPGWISPTLKAKKDNHVHAVKNLAKILPVSEVVVEVADWDIQKIRNPDISGYEYQNGPLAHYENLRAYVYARDGWTCQYCKSEDGNLTLDHIIPESRGGPTTPNNLVAACYNCNRAKGNQTAEEWGYPDIQERVKKNELAFKHAAHVGSIKNHIIYELSKEFPVRTTYGFYTHIKRRDELGLEKRHGHDAVAIACRWGEKVEVVSPIYQGRLKPSRRRQKYQMLMFPQYRYKPRTKKGKKDLDNQLAKLKYNSKNDPERLKAIARQLRALAPEFWEGKGYFVPKERNKRIVAKDGTIFKKSDYVEAVVSGKKCRGYVTALYSSGRLKVETSEGIKSASPDRSRKLQSARSIMWWEE

SEQ ID NO: 20009 - protein, 340 aa, Aneurinibacillus sp.; identical to SEQ ID NO: 10078

SEQ ID NO: 20010 - protein, 432 aa, unidentified
WQEGQFSERKAAEMLNNQKEYAFVLDAEGKKLDPTIIQNAWRLVRQKKATLIAKRPMTIQLKKVVDTPNNDEIRMGIDDGAKYVGLALVQKCKTKNKVIFVATMEHRIDVHKKIVQRHEYRRYRRYLKRYRKDKSLNRANSRKQGWISPTIKQKRHAVIRIVDVLSKYICIDSIYLEDVAIDIRVLTEGHQIYGEQYQISNRLDENLRKATVLRDNCKCQLCGKKNCRLEVHHITPRRMNGSNTIGNLITLCSDCHSKVTGREMEFADQFYSKIGKKRNNYGLIYASHVMIGKTWLREELAKRAQLTLTTGGDTANKRINWNLEKSHEVDAVCITSLRPEFVNVKKWRIKPLRHQIKKRKTIEVLRFRHRDIVSYVYRNGEYHEGYVTAIFPLSKRRKENLSFQSQTKHCCRVAINKCKFICRPNKFYWLSS

SEQ ID NO: 20011 - protein, 420 aa, unidentified
MQYVYVLNKHGEPLMPCSSGKARLLLKQQKACVVKRTPFTIKLLFGSTGYKQPITLGVDAGSKHVGLSASTEKRELYCEEFTPRNDVVDLLSTRKQNRRSRRNRKTRYRAPRFDNRVHSKRKGWLAPSVEVKIQEHITVIKRICRILPITLVRVETAEFDTQRLKAMLEGKPLPVGTDYQLGEIYDEYNVRQYVLKRDHYTCQCCGAHTTTKKTVKLHVHHLESRKVGGNAPSNLITLCTTCHDALHKGKVSLDGKERGKPLRDAAFMGIMRKTLMARLRDELSIPVQGTYGYITKMRREQNDIKKSHVNDARCISKHPLAEPCSVCYRTKAIRHHNRQTHKANFSKGSIRKRSQMPYVVEGYRLWDKVLYKGQECFVSGRRASGSFTLKKLDGTRISKGVTFKKLRLLEPATNYLIERM

SEQ ID NO: 20012 - protein, 442 aa, unidentified; identical to SEQ ID NO: 15850

SEQ ID NO: 20013 - protein, 452 aa, Petrotoga sp.; identical to SEQ ID NO: 7138

SEQ ID NO: 20014 - protein, 335 aa, Enterococcus sp.; identical to SEQ ID NO: 12846

SEQ ID NO: 20015 - protein, 423 aa, unidentified; identical to SEQ ID NO: 12394

SEQ ID NO: 20016 - protein, 431 aa, unidentified
MPNKVYIINKHGRPLMPCSPAKARHLLDAGKAKVKKRTPFTIQLVYGSSGYTQEVILGVDAGSKTIGMSASTTKEELLSAEVKPRNDVVDLLSTRREFRRAQRNRKTRYRKPRFDNRVRSKHKGWLAPSVEVKIQEHITAIRRVCGILPVSKVVVETAEFDLQLLKAIADGKPVPQGEDYQQGEMYGHYNVRQYVLWRDGYTCQCCGAHATKKKEVRLHVHHLESRKVGGDAPDNQVTLCESCHEKLHKGLIAEKDFKKRKRRSTRDATFMGIMRKTLMQRLCSELPIPVIETRGYITKATREKLLVLPKSHTNDALAIAQGKQGFNVGYLPEIAQIDKIYTIRPVRHHNRQLYKATILKGGIRKSNQTKKYVFGYRLFDKVQFNEQDCFIWGRRTTGIFTIKTINGKMIKDGISFKKLKPVEKSTRYLIA

SEQ ID NO: 20017 - protein, 411 aa, unidentified; identical to SEQ ID NO: 2663

SEQ ID NO: 20018 - protein, 451 aa, unidentified; identical to SEQ ID NO: 13438

SEQ ID NO: 20019 - protein, 480 aa, unidentified; identical to SEQ ID NO: 2726

SEQ ID NO: 20020 - protein, 305 aa, Lactobacillus sp.; identical to SEQ ID NO: 17440
  SITE 211: note = misc_feature - Xaa can be any naturally occurring amino acid

SEQ ID NO: 20021 - protein, 518 aa, unidentified
MTPKKRKEASRMSEYIYVLGMDGDPQMPTKRKRHVEKLLQAGRARVFRQIPFTIQLTYENKPVLQPVTIAEDPGRSNIGMAVVSLSGELLSAAVVQTRNKEIVKLMEKRKQHRRASRNGERKARQRLAKKCHTMIKTGFLMRKLPMYGKDKQVRCNVIKNTEAKFCNRKREDGWLTPSAEHLVRTHINLIHKMQKFLPITDVAIEINRFAFLSLEDPSISGVDFQNGPLKGYDDLNAAIEDLQDGHCLMCNSPIEHRHHIVPRNMQGSNTIGNIAGLCCKCHERVHKDARFEDRLKKKKAGLNKRYAAVSVLNQAIPFICKRLEQEFGKEHVHYCSGRDTSMVRRSLGYHKTKEKQLHEVDAWCIAVLALQHVPEKAPEFDHVHEILQFRRQDRSRIKAQTSRAYYHEGKKIAKNRKKAEGQREDSLQEWRKRQVERYGKEQTRKMISQLEVKESIRRYNRLDRLMPGAVFYYQGVRYVMRGQHSNGQYLQAVGMGDKDFPAKKCKIVVHNQGLVFVS

SEQ ID NO: 20022 - protein, 414 aa, unidentified; identical to SEQ ID NO: 3441

SEQ ID NO: 20023 - protein, 466 aa, unidentified; identical to SEQ ID NO: 13189

SEQ ID NO: 20024 - protein, 443 aa, Anoxybacillus sp.; identical to SEQ ID NO: 13210

SEQ ID NO: 20025 - protein, 489 aa, unidentified
MDMVYVLNKDGKPLMATTRGGRVRYLLKEKKARVVCTTPFTIQLNYDTPDITQDLILGIDPGRTNIGVAAVKEDGQCVFSAHLETRNKDVPLLMEKRAAFRRNHRNLDRRRKRQRRAKAAGTIVENETIERLLPGYEKPVVCHYVRNKEARFNNRCRPQGWLTPTANHLLQTHINLIAKIAKLLPVTKVVVELNRFAFMAMDNPNIRRWEYQQGPLYGLGSVEDAVYAQQDGHCLFCKKPIDHYHHVVPRNKNGSETLANRCGLCAKHHDLVHKDKAWTDKLVTRKEGMNKKYHALSVLNQIIPHLMEYLGSKTLYDVYATDGKSTKGFRIAKNVPKEHYTDAYCIACSILDTAIEVSAPTSPFKLKQFRRHDRQSCIRQMVDRKYLLDGKVVAANRHKAIEQKSDSLEEFREAYGDAAVSQLTVRPHLPQHKDMTRIMPGAVMDFNGTIGVMQSSTVGSFYKSTEGHKSTPRKCVLLMRNAGMVFIPA

SEQ ID NO: 20026 - protein, 413 aa, Clostridium sp.; identical to SEQ ID NO: 4134

SEQ ID NO: 20027 - protein, 452 aa, unidentified
MVFVLSNTNKKLMPTNEYRARKLLKSGKATIYKYRPFTIKLTEREDGYTQLVEYCCDTGYQHIGISIKSHRHEYVNEERILLKNETERHNDCRKYRRTRRNRLRYRKARWNNRRNNQICKDGFAPSIRNKRDVHISLFKMYYEICPITSATFEMGQFDTQVLKAIEEGKSLPEGIDYQHGEQYGYITLREAVFSRDNYTCICCGKSAIKDYVILKIHHLGYLIGDRSNRMANLGTVCSNCHTSKNHQKGGKLYNLKPRLKSFKGVTFMTMVRYDMFNKLKETAPDVNFHMTYGAITKLKRKDCNIKKSHNNDAYCMGKFHPKHRTNFMCYQKLKRNNRILSKFYDAKYIDLRDGTTKTGKQLSCNRTNRSEMRNSDKNERIYRGKKVSKGKTIVRKQHYQYRPHDYIWYQGTKYIVKGVQDKGKRIALQERLPISVIKIEKFIHANGWAKIY

SEQ ID NO: 20028 - protein, 231 aa, unidentified
MSTVYVLNKDGKPLMPTTRGGHVRHLLKEQKARVVRAKPFTIQLLYETNDVVQPLYLGIDPGRTNIGVAVVKANGTAVFTAHLETRNKEIPKLMQDRKKARRARRTNGRRCRRQRRAKANGTISKKCVKQTTAQNGSVSKRAKDIGVIKRRLPGCEKDVLCIGIKNKETKFTNRTRPEGWLTPTANQLLQTHINLVKKIQKFLPISDVVLEVNKFAFMRLDNPNIQKWQYQ

SEQ ID NO: 20029 - protein, 449 aa, unidentified
MAVFVLDKRKAPLMPCSEKRARHLLARGRAVVHKMRPFTIRLKDRLAADSVFQPLQIKIDPGSKTTGFAVARENAQESKNQAVLCLFELVHRGFQIKQALGERRAHRRHRRSKLRYRPARFDNRTKPKGWLPPSLQHRVDTTAAWVKRIIRLAPVTGIQQELVRFDTQQLENPEISGVEYQQGALLGYEVREYLLEKWGRECAYCGTQEVPLEVEHIIPRSKGGSNRVSNLTLACTPCNQNKSNQPLQVFFQQDKDLKKRLKKNGKSSDKQLERVLKQCKKPLRDAAAVNATRWALLNTLKGTGLPVKTGTGGQTKFNRRQLGIPKTHALDAACVGVVESLTGWQRPTLTIKATGRGSYKRTLLDRFGFPRGYLMREKSVHGFQTGDLVKAEVATGKKAGVHVGRVAIRKSGSFNIQMLDQLVQGISWKYCRIIQRGDGYGYHQTLTLK

SEQ ID NO: 20030 - protein, 423 aa, unidentified; identical to SEQ ID NO: 3951

SEQ ID NO: 20031 - protein, 419 aa, Anaeromusa sp.; identical to SEQ ID NO: 9140

SEQ ID NO: 20032 - protein, 430 aa, unidentified; identical to SEQ ID NO: 14357

SEQ ID NO: 20033 - protein, 465 aa, unidentified; identical to SEQ ID NO: 5709

SEQ ID NO: 20034 - protein, 418 aa, unidentified; identical to SEQ ID NO: 6835

SEQ ID NO: 20035 - protein, 358 aa, unidentified
VRYRHPKWRHHTVRAYIQKGCRKKGVKRHWKKLKVQVSSPRPEGWLPPSLQSKTDHHIRWIHRLLDVLPKDTGMVLEAGRFDVARMKNLEIHGELYQRGPQYDYENVKAYVFDRDNYKCRCCHAKAGTRRKNGTVVKLIAHHIDYRSKGASDNPDALASVCDACHTAANHQPGGVLYDWMVKNKRFKQGLRDTAFMNILRRRLFEAFPDAEYTYGNITAARRKELMLPKSHADDAVAIACTGMDISSIGKRPDHVVYVQQVRKKKRSLHEANPRKWSKTKNRFAVRNSKNTKEVNGVCLFDRVEVPGKGYGWVTGFIIQPPVEMGDFLPGRVKEGKMRKEHEKVICRIRNRKHYVRWL

SEQ ID NO: 20036 - protein, 424 aa, unidentified; identical to SEQ ID NO: 13009

SEQ ID NO: 20037 - protein, 456 aa, unidentified
MLTYVLAADGSPLMPTYNISKVRRMLKDGRAVIAGHKPGFTIRLTYALPDQKTPHTQKIELCEDTGYQHIGVSVKSKKHEYVHLQVDTLADEKNHHDAQRRYRRNRRNRLRYRAPRFDNRTHSKKPGWIAPSLQHKADIHVRLVSTFQNVLPICDVYLEVGTFDTQVLEAKEKGLPIPEGSDYQHGARYGIATLREAAFYRDGYKCQCCGKGIKDGRILRVHHIGYWKTPSDHTDRMGNLITVCTKCHTAANHKKGGKLFGWKPKMKPLTGAAFMNTVRWKIVQAVKDLDSNLTVHTTYGAYTKLSRREHSIAKTHANDAYCMGAFQPRHRTTEQLLKKKRRNNRVLSKFYDAKYIDSRDGVKKSGSELSCGRTNRSEQRNGEKNLRIFHGSKVSKGRITVRRQRYPIQPGTVVLYNKRKIAVLGTHGNGTKVLLPTKKDVSPKKVAIVYHAGAFV

SEQ ID NO: 20038 - protein, 431 aa, unidentified
MPNKVYIINKHGRPLMPCSPAKARHLLDAGKAKVKKRTPFTIQLVYGSSGYTQEVILGVDAGSKTIGMSVSTTKEELLSAEVKPRNDVVDLLSTRREFRRARRNRKTRYRKPRFDNRVRSKHRGWLAPSVEVKIQEHITSIKRVCRILPVSKVVIETAEFDLQLLKAIADGKPVPQGEDYQKGEMYGHYNVRQYVLWRDGYTCKCCGAHTTKKKEVRLHVHHLESRKVGGDAPDNQVTLCESCHEKLHKGLIAEKDFKKRKRKSTRDATFMGIMRKTLMQRLCSELPIPVVKTRGYITKATREKLLVLPKSHTNDALAIAQGKRGFNVGYLPEIAQIDKIYTIRPVRHHNRQLHKATILKGGIRKSNQTEKYVFGYCLFDKVQFNGQDCFIWGRRTTGIFTIKTINGKMIKDGISFKKLKLVEKSTSYLIA

SEQ ID NO: 20039 - protein, 453 aa, Halomonas sp.; identical to SEQ ID NO: 8186

SEQ ID NO: 20040 - protein, 428 aa, Enterococcus sp.; identical to SEQ ID NO: 4335

SEQ ID NO: 20041 - protein, 425 aa, Nodularia sp.; identical to SEQ ID NO: 2911

SEQ ID NO: 20042 - protein, 389 aa, unidentified
MPCSPAKARLLLKEKKAIVKRRTPFTIQLTIATGEAKQPITLGVDSGYKHIGLSATTEKAELHASQVELRQDITDLLSARLALRRSRRSRKTRYRAPRFNNRVASKRKGWLAPSVENRIAAHMSRVEAVMRVLPVTAITVETAAFDTQLLKNPDIAGAAYQQGEQLGFWNVREYVLFRDGHVCQHCRGKSKDPILNVHHIESRRTGGDAPNNLITLCETCHKAFHRGEIELKVRRGKSFKAETFMGIMRWTLFERLKKAHPELRVRNTYGYLTKHKRISHGIAKSHCADAYCIADNLGAKRLSGYLFQKQTRKHNRQLHKLSILKGGLRKKNQAPYEVKGFRLFDKVICKGEEAFIFGRRTSGSFDVRRLDGTRISAGINYKKLRLLEP

SEQ ID NO: 20043 - protein, 416 aa, unidentified
MVYVLDKNGQPLMPTDRHRKIRLMLQSGQAKVIKRCPFTIQLTYNTGHQAQEISLGIDAGSKHIGVSATTKTRVLYEADVELRNDIVDLLSSRRELRRGRRNRKTRYRPARFDNRRREDGWLAPSIRQKIGTHLTVVENICKILPISRITVETASFDIQKIKNPDIQGAEYQQGDQLGFWNNREYVLFRDNHTCQCCKGKSKDKILNVHHIESRKTGGNAPNNLITLCEICHTGYHKGAIQLPKTVKRGMRFKDAAFMGIMRWAFYEALKQQYEPVGTPVHNTYGYITKHTRIEHNLPKEHYVDARCISGNPDAFPNGEYYYQKKVRCHNRQMHKLTILKGGIRKQNQATYLVKGYRLFDKVSYQRKEYFVFGRRKSGFFDIRTLSGKQVNKGSLSCKKLKFIATRMYYLIERRAV

SEQ ID NO: 20044 - protein, 527 aa, Streptomyces sp.; identical to SEQ ID NO: 8145

SEQ ID NO: 20045 - protein, 442 aa, unidentified
MVTVQQSTHHLPFGRVFIRRNLFMVYVISQDGKPLMPCSDPIARLLLKQGKAKVKKREPFTIKLTYETTNHTQGLTLGVDTGSGTIGTAVSKDNGDIVYMSEVVVRNDITDKMTQRAKYRRNRRNRKTRYRKARWLNRASSIKKDRFSPTMQSKLHSHVREIEYIQSILPVTEMVFETGQFDMQLMKNPSLANPKVRPWGYQKGANYGFENTKAMVLNRDNYTCQCCKGKHKDSKLEVHHIVFRSQGGSDEESNLLTLCHTCHKDLHSGKINPKLSGKVKGNLKYATQMNSIRKQLFRFYPNAIETFGYVTKANRLHLGVDKEHYYDACTIATQGNAFNVKSNLYKKKCVSDGDFQKTKGIRSEEPIVTDKICGFRKFDKVRYFGNDYFIKGRMSTGYAILMDIDGNKIDFSTMPRGYKTPKLSNCKRITARSTVMTQVKVV

SEQ ID NO: 20046 - protein, 455 aa, unidentified
GIDPGRTNIGVAVVKTDGTAVFTAHLETRNKEIPKLMKKRKDSRRARRTNGRRCRRQRRAKANGTISKKCVKQTTAQNGSVSKRAKEIGVIKRRLPSCEKEVLCIGIKNKEAKFNNRTRPEGWLTPTANQLLQTHVNVVKKIQKFLPISDVVLEINKFAFMQLNNPNIQKWQYQQGPLYQKADLEEAVSEMQEHHCMFCKNPIDHYHHVVPQHKNGSNTIDNIVGLCTKHHDLVHKDTAWYEKLTKKKTGLNKKYGALSVLNQIIPALTKGLSSLFQKHFFVTTGKSTYDYRAAHGVSKDHWLDAYCIACSVLPNDVCDSNINSHVPYELKQFRRHDRRALHKENINRVYTLNGKKVATNRHKAIEQTTDSLEEFRQNHPDDVCKLKVKEHHPEYRNPKRNFPGCVFLVGKRTHVMQGTSGSHNGKADGYYDTNGNSYPSGKCKFVAKNKGIVFA

SEQ ID NO: 20047 - protein, 502 aa, unidentified; identical to SEQ ID NO: 16429

SEQ ID NO: 20048 - protein, 419 aa, unidentified; identical to SEQ ID NO: 4877

SEQ ID NO: 20049 - protein, 423 aa, unidentified
MVYVLNIDGQPLMPTDRHGKVRHLLKDGRAEVVKCCPFTIRLLYDSTHYTQDIVLGVDAGSKHIGLSGTTETKELYASDVELRNDIVDLISTRRQNRRSRRNRKIRYRKARFQNRVSGKKNWLAPSIRQKVDTHMTVVSRVCMILPVTKIIVETASFDIQKIKDPDISGTGYQHGEQLDFWNVREYVLSRDGHTCQCCKGKSKDPVLNVHHIESRKTGGDAPNNLITLCETCHKSYHSGAVQLPKAIHRGMRFKDAAFMGIMRWAFYNKLKEVYEPQDIEVSMTFGYLTKNTRIRHYLPKEHYIDARCISGHPEAIPNNEVFYQKKVRCHNRQIHKNTILKGGVRKRNQTGYLVKGFRLFDKVAYKGREYFIFGRRQSGFFDLRNLSGCKVNKGSLSYRKIGFLEPRQYYLCERRVMDTQGCA

SEQ ID NO: 20050 - protein, 418 aa, unidentified; identical to SEQ ID NO: 6784

SEQ ID NO: 20051 - protein, 279 aa, unidentified
VVVETAEFDLQLLKAIADGKPVPQGEDYQKGEMYGHYNVRQYVLWRDNYTCQCCGTHPSKKKEVRLHVHHLESRKVGGDAPDNQVTLCESCHEKLHKGLIAEKDFKKRKRRSTRDATFMGIMRKTLMQRLCSELPIHVVETRGYITKATREKLLVLPKSHINDALAIAQGKQGFNVGYLPGIIQTDKIYTIRPVRHHNRQLHKATILKGGIRKSNQTEKYVFGYCLFDKVQFNGQDCFIWGRRTTGIFTIKTINGKMIKDGISFKKLKPVEKSTSYLIA

SEQ ID NO: 20052 - protein, 428 aa, unidentified; identical to SEQ ID NO: 5036

SEQ ID NO: 20053 - protein, 442 aa, unidentified; identical to SEQ ID NO: 7529

SEQ ID NO: 20054 - protein, 419 aa, unidentified
MVYVINKEGQALMPTERFGKVRRLLKNGLAHVICRIPFTIRLNYETTHFVQPISLGVDAGSKHIGISATTSEKELYAADVELRNDIVDKLSTRREQRRTRRNRLRYRKARFNNRVSSKHKGWLAPSVENKIQTHLTVVEKIHKFLPITKIIVETASFDIQKIKNLSISSEEYQQGEQLGFFNVREYVLFRDNHTCQHCKGKSKDHILNVHHIESRKTGGNSPSNLITLCESCHKAYHNGKIDIKIKRGASFRDATFMGIARWTTYERVKNIYPNVSMTFGYITKNTRITNGLPKEHYVDARCISGNPKSKPLGYYFYQKKVRCQNRQIHKANFLKGGRKKLNQSPFLVKGYRLFDLVEYQKELYYIFGRRDRGFFDIRKLDGTKVNKGSISCKHIRLVSKRRSILTERRNSCSIPPTKL

SEQ ID NO: 20055 - protein, 411 aa, unidentified; identical to SEQ ID NO: 6901

SEQ ID NO: 20056 - protein, 419 aa, unidentified
MLVYVLKQNGQPFMPTERFGKVRRLLKEGKAKVVRREPFTIKLLYEPETDVVQECYCGVDTGSKHIGVAVVGNDKVLYQSQTELRNDIKRKMDARRTSRRSRRNRKTRYRKSRFLNRRNSIKKDRLPPSVKHKVQSHIDEIEFCKKILPISDLILEVSQFDTALMKNPSLMDEKIKKWGYQQGFNYGYSSRRSAILNRDNYTCQCCGKKNCRLEVHHIKFRRDGGTDDEENLITLCEDCHKGVHAGTVTLNKKPKKSKGLKHATHMSIIRSQLLKKYPDAIETFGFVTSENRNHLKLEKDHYIDACIIASGGLEFKELDVIYRKRRVSKGDYQVTRGVRGEQKLPTGKIYGFRKFDKVKYFGKEHFIKGRMSSGFAGLMDIFGNEVDFDFMPKGSKTPKLSNCERISARRSILCIKERK

SEQ ID NO: 20057 - protein, 264 aa, unidentified
MCKVFVLDSEKRPLDPIHSARARQLLRNKKAAIYRRFPFVIILKDSHPDSSVTTLRLKLDPGAQTTGIALVSDATGEVVFAAELKHRGFAIREALTSRRQLRRSRRTRKTRYRQPRFLNRKRSEGWLAPSLQSRVHNIKTWVKKLCKFALIAAISQELVRFDMQLMRNPDLQGKEYQQGLLAGYETREYLLEKWGRQCAYCGVKNVPFQVEHIHPRAKGGTNSVTNLTLSCEKCNTKKGTKDIKEFLKKSHDYYHKSWRKLKDH

SEQ ID NO: 20058 - protein, 439 aa, unidentified
MVTVQQSTHHLPFGRVFIRRNLFMVYVISQDGKPLMPCSDPIARLLLKQGKAKVKKREPFTIKLTYETTNYTQGLTLGVDTGSGTIGTAVSKDNGDIVYMSEVVVRNDITDKMTQRAKYRRNRRNRYRKARWLNRASSIKKDRFSPTMQSKLHSHVREIEYIQSILPVTEMVFETGQFDMHLMKNPSLANPKVRPWGYQKGANYGFENTKAMVLNRDNYTCQCCKGKHKDSKLEVHHIVFRSQGGSDEESNLLTLCHTCHKDLHSGKINPKLSGKVKGNLKYATQMNSIRKQLFRCYPNAIETFGYVTKVNRLHLGVAKEHYYDACTIATQGNAFNVKSNLYKKKCVSDGDFQKTKGIHSEQPIVTDKICGFRKFDKVRYFGNDYFIKGRMSTGYAILMDIDGNKIDFSTMPRGYKTPKLSNCKRITARSTVMTQVKVV

SEQ ID NO: 20059 - protein, 458 aa, unidentified
LTKDENRPSGRTTGLRAEQAEPAGIRKGDTLKVFVLNMRGKPLMPCSPAKARHMLKAGKAVVVRRTPFTIKLTIATGETKQDVTLGVDAGARHVGISATTEKEEVFASEVALRQDITGLLADRLAFRRARRNRKTRYRAPRFNNRVRSKHKGWLAPSVENRIQAHISRIEAVCRLLPVTKIVIETASFDIQKIRNPEVEGTGYQQGDQLGFWNVREYVLFRDGHICQHCRGRSKDPILNVHHLESRKTGGDAPNNLITLCETCHKAYHAGKIKLKVKRGQSFRAEAFMGIMRWTLLDRVRKAHPGLPVENTYGYLTKHTRITHGLPKTHCVDAYCIAGNLKAVRRGVYLHQRQMRKHNRQIHKFTVLSKRLEDGTKIGYRKLNQSPYLVHGFRLFDKVRCLGQIGFIFGRRSSGYFDVRRLDGVKLSPSISWRKLTLLEKRSTYLTELRKQDGASSPV

SEQ ID NO: 20060 - protein, 396 aa, unidentified
  source 1..396: note = Candidatus Anoxychlamydiales bacterium
MPCKPRKAKILLKQKKAKVVKMTPFTIQLLRPTKRNVQKINLGIDVGYNHVGLSAITNSKEIYAEEIHLREDIVSLNSERRQYRKSRRYRKTWYRKPRFLNRKKDKGWLAPSIKHKLDSHVKVIKKVKKILPISKIIVEVASFDIQKIKNPNISDKEYQEGDQLGFWNVREYVFHRDNHKCQNCIGKSKDTILNVHHITSRKTGGNRPDNLITLCKTCHLKYHDNELKISFKKSKNFKAETFISSIRWKLIEILKIENNISYTFGYKTKRNRILQKLKKSHITDAFVIAGGTNQIRQSGFFYTKQVRRSNRKLFKGIRSHLKNTATRFIKGFQRFDKVFWNKKTCFIFGRRKTGYFDLRQLNGVKIHASAKAKDCILLETFKTFLTEWRVGVSSHP

SEQ ID NO: 20061 - protein, 413 aa, unidentified; identical to SEQ ID NO: 13149

SEQ ID NO: 20062 - protein, 423 aa, unidentified
VLQAPNPVQHWRRMSTGLRAVQAEPAGIRKGDALKVFVLNMRGRPLMPCSPAKARHLLKAGKAVVRRRTPFTIQLRIATGETKQSVTLGVDAGAKHVGLSAATEKEEVFASEVELRQDITGLLAARLSLRRERRQRKTRYRAPRFLNRVRSKHKGWLAPSVENRIQAHMSRIDAICGLLPVTKIVIETASFDIQKIKHPDVEGTDYQQGDQLGFWNVREYVLFRDGHVCQHCHGHAKDKILNVHHLESRQTGGDAPNNLITLCETCHKACHAGKIKLKVKRAQSFRAEAFMGIMRWTLLDRMRKAHSGLPVENTYGYLTKNTRITLGLPKTHCVDAYCIAGNLKAVRRGVCLHQRQVRKHNRQIHKCTVLSKTLKDGTKIGYRKLNQTPHLVKNFRLFDKVRCLGQTGFIFGRRSSGYFDVRR

SEQ ID NO: 20063 - protein, 430 aa, unidentified; identical to SEQ ID NO: 6024
  source 1..430: note = Spirochaetales bacterium UBA4629

SEQ ID NO: 20064 - protein, 544 aa, unidentified
MKQKKQKVMVYIINKKGKPLMPTTRCGHVRKLLDSKKAVVVSSNPFTIRLKYDTPNGVQDVFAGIDSGRENIGSGASNEDGDCLYLGELKTSNKSIKMKMTERAGFRKERRSHDRQNKQRKARKDHTEIQNGNADICRTTISCKSVQISYPAAEKSVTHKIIRGKEGKFANRHRDEGWITPSARQLVQMHMNDLKSMCRILPISHVTLERVAFDFQKLENENIKAWEYGKGKLYGYDSPEEYIHDVQGGKCLICGKPHIDYLHHIIPRSKGGSNKVSNLAGLCYDCHYGPMGVHNCQDTQDRLPELKNEANKQYKVSLLNSVMPVLIEEMDKFCKANSIIFSICGGHDTAKVRDMYDLQKDHCIDGFAISLAGRNVKSVDVMPDRIHQKQRYKKKSKNIIQKRNCREYYDGKKLAAVNRHKGTDQKADSLEEYMNTYAETHTADECKKHFESLTVKPARRTYTFHKEGRICPFHIGDKVRYEKKNKIKGNTKVETFICEGIRFPKDENKAKVEHNKTKSKKMKFCRVLEPGCTPYIDYRKLVLI

SEQ ID NO: 20065 - protein, 420 aa, unidentified; identical to SEQ ID NO: 7360

SEQ ID NO: 20066 - protein, 512 aa, unidentified; identical to SEQ ID NO: 14331

SEQ ID NO: 20067 - protein, 442 aa, unidentified; identical to SEQ ID NO: 2807

SEQ ID NO: 20068 - protein, 431 aa, unidentified; identical to SEQ ID NO: 6230

SEQ ID NO: 20069 - protein, 425 aa, Tolypothrix sp.; identical to SEQ ID NO: 3714

SEQ ID NO: 20070 - protein, 512 aa, unidentified
MSTIYVLNKDGKPLMPTTRGGHVRHLLKEQKARVVRTKPFTIQLLYETDDVVQPLYLGIDPGRTNIGVAVVKADGTAVFTAHLETRNKEIPKLMKKRKDSRRARRTNGRRCRRQRRAKANDTLSTKRVKQTTAQNGSASKRAKEIGVIRRRLPGCEKDVLCIGIKNKEAKFNNRTRPEGWLTPTANQLLQTHINLVKKIQKFLPISDVVLETNKFAFMQLDNPNIQKWQYQQGPLYKKESLESAVSEMQEHHCLFCKKQIDHFHHVVPQHKNGSNTIGNIVGLCARHHDLVHKETAWQEKLAKKKTGLNKKYGALSVLNQIIPALTKELGVLFPKHFFVTTGKSTYDYRAAHGVCKDHWLDACCIACSVLPNDVCDSSINNRVPYELKQFRRHDRRVLHKENMNRVYTLNSKKAATNRHKATEQESASLEEFRKEHPDDVCKLKVKEHHPTYRNMNRNYPGSVFFVDKQVHVMQGIARSKDGKATTYKDTNANLITAEGCKFVAKNSGILFV

SEQ ID NO: 20071 - protein, 470 aa, unidentified; identical to SEQ ID NO: 2825

SEQ ID NO: 20072 - protein, 423 aa, Phormidium sp.
MSNHVFVLDTNRKPLTPCKPGVARSLLRAEKASVFRRYPFTIILNKEVDANPEPLELKLDPGSKVSGMALKQGNHIIFAAELQHRGEPIKKALLSRRQLRRSRRNRKTRYRPARFLNRTRPQGWLAPSLQHRVDTLMTWVNRFRRLAPVGSMAQELVRFDLQLMENPEISGVEYQQGELQGYEVREYLLEKWDRTCAYCGAQHVPLEVEHIQPRSKGGSDRVSNLTLACHSCNQAKGHGDIRDFLSGQPDVLSRLLGQAKSPLKDAAAVNSTRWALFKALKATGLPVTTGTGGQTKFNRLRLNLPKAHWLDAACVGPVESLDILTSKPLLILAKGHGTRQMCGTNKYGFPTRHRSRRQIHKGFQTGDIVTATVTAGKKIGSYVGRVLCRASGSFDITTASVRVAGISHKYCKPIHRKDGYAYA

SEQ ID NO: 20073 - protein, 442 aa, unidentified; identical to SEQ ID NO: 12866

SEQ ID NO: 20074 - protein, 477 aa, unidentified; identical to SEQ ID NO: 2707

SEQ ID NO: 20075 - protein, 414 aa, unidentified
MPCSPAKARLLLKEKKAIVKRRTPFTIQLTIATGETKQPVGLGVDAGYKHVGLSASTDKAELYASQVELRQDITDLLSARRALRRARRNRKTRYRAPRFNNRIRTKRKGWLAPSVENRINAHLSRIEAVLRLLPVTKITVETASFDMQRLKNPDISGKEYQEGEQLGFWNVREYVLFRDGHVCRHCHGRSKDPVLNVHHLESRRTGSDSPDNLITLCETCHKALHRGEITLKAKRGQSFRAQAFMGIMRREVLNRLKASYPELKVHETYGYLTKHARIANGIVKSHGADAFCIAGNLGAERLGEFFFQKQTRRNNRQIHKLSILKGGIRKRNQAPFEIKGFRLFDKVACKGEESFIFGRRSSGYFDVRKLDGTRISAGISYKKLRLLEKRRTYLTEIRKEEALPPLPEGRGLRA

SEQ ID NO: 20076 - protein, 213 aa, unidentified
MSTIFESRKYGGNAPDNHGTLCDDCHKKFHLGIITDVKLKTRRRQSTRDAAFMGIMRKTLMWRLRTELFIPVAETKGYITKATREKLLVLPKSHTRDALAIAQGRHGFGIKEYAYVEPANHIYTVRPVRHHNRQLHKASILKGGIRKRNQASKYVFGFRLYDKVLYQGKACFVWGRRTSGTFLLRTIDGIKVKDGVSYRNLTLLERSSNYLIA

SEQ ID NO: 20077 - protein, 428 aa, Enterococcus sp.; identical to SEQ ID NO: 4335

SEQ ID NO: 20078 - protein, 416 aa, unidentified
MVYVLGQDGHPLMPTCRHGKVRRMLKSGMAKVVKRCPFTIQLRYESTIHTQEINLGIDAGSKTIGVSATTEKKVLYESEVILRNDIVGLLSGRRALRSSRRNRKTRYRKPRFDNRKKPDGWLAPSIRQEIETHVTVVGNVIKILPVTKIIVETASFDIQKIKNPEIEGEGYQHGEQLNFWNVREYVLFRDGHTCQCCKGKSKDSILNVHHIESRKTGGNAPNNLITLCETCHKAYHKGIITLPKEIYRGMRFRDAAFMGVMRWAFYDRLKELYNPLGVEVINTYGYITKNTRIEYGLPKEHYVDARCISGNPAAKPLDHYYFQKKVRCHNRQIHKNTILKGGYRKRNQVEYEVKGFRLYDQVLWKGQKCFIFGRRSTGRMDLRLLDGTHVNASVGYKNLKLLSMRKNYLIEQRKAG

SEQ ID NO: 20079 - protein, 450 aa, unidentified
  source 1..450: note = Archaeon sp.
MQKLLVEFENTPRDAPQVPCSISGALNRDKSLSVPCIVLADNNSDKDQHSGKSGQALSVPVINMRGKPLMPTRPRKARILLQQGKAIVIQRAPFTIQLCYLTGNYTQNIKLWIDTGYSTIGFSTINNKCELLSGELTLQKRISKLIEEKSNYRKTRRSRLWHRKSRFNNRNKPEGWFAPSIQHKLKTHLRLIEKLKKILPVTKITIEVASFDTQKLQNPEITGVEYQQEELQGYEVREYMLEKWKHKCAYCGKSNLPIEIEHIIPKSRGGTDRVSNLTLVCHKCNQKKGNQTAAEFGHSEIQKKTKQTLKATAFMNIVRWRLVNTLKCSWTYGYITKHARIKLGMKKSHVNDAFIAGGNVQERSRSYELTQTRRNNSSIQTNRKGHKPSVRKKRYRLQPNDLVKYIKSLCKVKGVHNYGKYVIVEDKIEEIFDINVKKVEMVKHGKGIQF

SEQ ID NO: 20080 - protein, 442 aa, unidentified; identical to SEQ ID NO: 2903

SEQ ID NO: 20081 - protein, 512 aa, unidentified
MSTVYVLNKDGKPLMPTTRGGHVRHLLKEQKARVVRAKPFTIQLLYETNDVVQPLYLGIDPGRTNIGVAVVKANGTAVFTAHLETRNKEVPKLMQDRKKARRARHTNGRRCRRQRRAKANGTISKKCVKQDTAQSKNPSKRAKEIGIIKRRLPGYKKDVLCIGIKNKEAKYTNRTRPEGWLTPTANQLLQTHINLVRKMQKFLPISDVVLEVNKFAFMRLDNPDIQKWQYQQGPLYQKGSLENAVSEMQEHHCLFCDKPIDHYHHVVPQSENGSNTIANIVGLCAEHHNLVHKDAAWQKKLAEEKVGLNKKYGALSVLNQIIPALTNKLSVLFPKHFFVTAGKSTHDYRAAHGVSKDHWLDAYCIACSVLPSNVCDSNINNHMPYELKQFRRHDRRVLNNENMNRVYTLDNKAVAINRHKATEQEAASLEEFRKEHPNDVCKLKVKEHHPTYRNMNRNYPGSIFLVGKHVHIMQGIAGSKDGKATTYKDSNANSITASKCKFVAKNSGILFV

SEQ ID NO: 20082 - protein, 407 aa, unidentified; identical to SEQ ID NO: 11574

SEQ ID NO: 20083 - protein, 403 aa, unidentified
IQLLYDTTNHTQDITLGVDAGSKHIGLSATTEDKVLFEADAELRNDISKLLEARYTFRRSRRNRKTRYRKKRFDNRVSSKHKGWLAPSIEHKIQSHFAMVEKVHRILPVTKIVVETASFDTQLLKAQLEGKPIPQGTDYQNGELAGWNIREYIFHRDNYTCQWCKGKSKDPVLVTHHHADWKGDHTNKPSSLITLCNTCNDSKYHKKEANRLWGWEPKITNSYKHAVFMGVMRWTFYNRLKEIYPNVSMTYGYITKNTRIENNLPKAHYVDARCISGHPEAKSNGEYFYYKKVRCHNRQLHKANTLKGGIRKRNQAEYTVKGFRLFDRVEYQNNEYFVFGRRASGFFDIRTLDGQKVNKGSISFKKLKLKETSKTYLIERRMADTGVSLAPLTTEVTSLRQTG

SEQ ID NO: 20084 - protein, 456 aa, unidentified
MKQKGGHRMPDTDYIYVLGRDGKPQMPTKRKRYIKKLLDSGKARIACRIPYTIQLLYENEPVLQPLMAGIDPGHTNIGVSVVNKNAEPVFSAVVETRNKDIKKLMDERRVHRRASRNGERKARQRLARRFGTILKAGMVMRKLPQYAVNKFVTCKIIRNTQARFCNRVREAGWLTPSARQLVETHVNVVKKIQKFLPVTDVTLEVNLEVNRFAFALMDDPETSGINFQNGPLLEKLKVGILKKYGALSVLNQAIPYIWSRLAEHVDTEHLNACTGRDTSMARQSLGYEKTKDNQMHEADAFCIACLGAGLIPAAAPGLTYVHKIVQFRRHDRAIINNQRERTYRLNGKIIAKNRRPRFEQKCPSLSGWYEEQVKCHGRKEADRLRSQLTVEKSTRRYNDPDRLMPGALFKYMGEYHVLSGQLSNGQYLRAYGDKKTNYPAKKCLIIRHNEGLVFVA

SEQ ID NO: 20085 - protein, 415 aa, unidentified; identical to SEQ ID NO: 10041

SEQ ID NO: 20086 - protein, 390 aa, unidentified
  REGION 1..390: note = IscB polypeptide
MSTVFVIDGEGKPLLPTCEARARLLLKKKKARVYSVVPFTIQLTKVIDNPVGEFSIGIDDGGKFIGISIAHEEKIVFAGNIKLRLDVHRKMLQRAQYRSTRRSRIRHREVRFLNRGQLGWIPPTIHQKKESILRVVDDLSKRLNITKCIVEQGQFDISSINKGYKLVGKEYQQAEYEGNNWREKVLWRDKYTCQHCDSKHNLHTHHIKQIINGGTNIVSNGVILCQECHESLHRGEWIWIGKIKNFKYPTHLQQGKWWLFNELKKRIDKVQICYGWMTAMKRKELGLNKDHYHDASAMINANKYHCKPYEILPRRTKKWENHPTRKCIEKKGFKHFDIVKAKHKTRGIIIGSIRSLKAKAITLRTNFDNNFTVSYSKTKLLWRPRGLIYC

SEQ ID NO: 20087 - protein, 406 aa, unidentified; identical to SEQ ID NO: 19726

SEQ ID NO: 20088 - protein, 420 aa, unidentified; identical to SEQ ID NO: 16221

SEQ ID NO: 20089 - protein, 416 aa, Parasutterella sp.; identical to SEQ ID NO: 10114

SEQ ID NO: 20090 - protein, 418 aa, unidentified
MVYVLNKNNEPVMPCSERKARLLLKQGRAVIYRKDVFTIKLINGSYGYKQHITIGIDCGSKHIGISATTNKKELFSANAELRNDIVKLLSDRKSLRRNRRYRKTRYRKPRFDNRRIKEGWIAPSIRQKIDSHVRIVSLIHKLLPVKQVNVEVVAFDMQKIKNPDIKRSEYQMGEQLDSYNVREYVLFRDNHICQHCKGKSKDDVLQVHHIESRKTGGNAPNNLVTLCKTCHEKYHSGEITLNVNRGKSFRDASAMSTMRWFLYEELKSRFSNVNITYGYITKYKRIKLGLSKEHYNDAYCISGNLNTSRLCNHHLIRFIPRHSRILHVQKFSKGGVRRSASAPYWLNGGKPSKHGIIFTRFDKVKFNSVVCFISGSSNGFASLRDINWNKVHGCKTTVTVNKLVLVSRRRGSMLFGEL

SEQ ID NO: 20091 - protein, 413 aa, unidentified
MTSYAFVLDANGKQLAPTKEQKAWFFIRKKRASLVSKYPIVIQLMKEIPEKEICQDEIRCGIDDGGLHVGIALVQKCKTKNKVVFKGTIEQRNDVKHLMEVRRGYRRYHRYHKRYRQARFDNRKSSKREGRIAPSILQKRQATIRVIHWLNKWINITNYWLEDVSVDIRALTDGYQSYRWQYQKSNRLDENIRKAAILRDGGKCMECGKSNCRLEVHHIKPKRRNGSNTLDNLITLCESCHQKTEGQEELYMDRYFSLLKSSDNKNLNYAQHVMIGKMWLRKQLSGLGVLYLTSGGDTANKRIDWNIEKSHANDAVCITDLRPDTCDVKEWTMKPMRRQSKAKTDHVLGIHHRDLVEYTFKNGETHRGYVTALYPEQKAINFQSPTKHCKKVNARKCKLLWKYSKIYWFENAS

SEQ ID NO: 20092 - protein, 470 aa, unidentified
MNVFVVGLNGCRLMPVSERKARLLLDDGKASVYRKVPFTIKLNYKTGSTTQPGYLGIDTGSQHIGVSVVRKDGTVLHKEEISLRDSMTKRKLLEAKASLRRGRRYRKTRYRHPKWRPKTKRVYCEVPDKKGRHWQKQKNTFTSKRPEGWLPPSLQSKTDHHIRWIKKLQNFLPEGYRLSIELGRFDPARMKDPEIHGELYQKGPQYDYENVRAYVLDRDRYTCQVCRRKGGKLHVHHILYRSQGASDTPQYMATVCSSCHTTENHLPGGILYQWMQEQKKFTRGLRDATFMNILRKRLMKTFPDAVFTYGNITKVDREKLKLSKNRGNDATAIALVRTGVTSVKDEEPVLYIQQVRRKKRSLHEETPRKGRKEPNRTAARNSKNTKAVTVTKRRGGKKVSVTACLFDRVELNGKKGWITGFTGKACRIVDTEGNYVAATDKYTQVNISSIRILHHTGNWVTGLKRNVGKR

SEQ ID NO: 20093 - protein, 397 aa, unidentified
  source 1..397: note = Sutterellaceae bacterium UBA7100
IVKRRTPFAIQLTIATGETKQPVSLGVDAGYEHVGLSASTEKAELYASEVELRQDITDLLSARRALRQSRRNRKTRYRAPRFDNRIRTKRKGWLAPSVENRINAHLSRIEAVLRLLPVTKITVETASFDLQLLKNPDISGKEYQEGEQLDFWNIREYVLCRDGHVCQHCYGRSKDPVLNVHHLESRRTGGDSPGNLITLCETCHKALHRSEITLKAKRGQSFRAEAFMGIMRWKVLNRLKASHPELEVNNTYGYRTKHARIANDIAKSHCADAFCIAGNLGAERLGEFFFQKQTRRNNRQSHKLSILKGGIRKRNQAPFEVNGFRLFDKVACKGEEGFIFGRRSSGFFDVRKLDGTRISAGISYKKLHLLEKRRTYLTEIRKEEALPSLREGRGLRA

SEQ ID NO: 20094 - protein, 431 aa, unidentified
MPNKVYVINKHGRPLMPCSPAKARHLLDAGKAKIKKRTPFTIQLVYGSSGYTQEVILGVDAGSKTIGMSVSTTKEELLSAEVKPRNDVVDLQSTRREFRRARRNRKTRYRKPRFDNRVRSKHKGWLAPSVEVKIQEHITSIKRVCRILPVSKVVIETAEFDLQLLKAIADGKPVPQGEDYQQGEMYGHYNVRQYVLWRDDYTCQCCGAHATKKKEVRLHVHHLESRKVGGDAPDNQVTLCESCHEKLHKGLITEGDFKKRKRRSTRDATFMGIMRKTLMQRLCSELPIPVVETRGYITKATREKLLVLPKSHTNDALAIAQGKQGFNVGYLPEILQIDKIYTIRPVRHHNRQLHKAAILKGGIRKSNQAGKYVFGYRLFDKVQFNEQDCFIWGRRTTGIFTIKTINGKMIKDGISFKKLKLLEKSTSYLIA

SEQ ID NO: 20095 - protein, 406 aa, unidentified; identical to SEQ ID NO: 2703

SEQ ID NO: 20096 - protein, 515 aa, unidentified; identical to SEQ ID NO: 15867

SEQ ID NO: 20097 - protein, 431 aa, unidentified; identical to SEQ ID NO: 15618

SEQ ID NO: 20098 - protein, 425 aa, unidentified; identical to SEQ ID NO: 10997

SEQ ID NO: 20099 - protein, 406 aa, unidentified; identical to SEQ ID NO: 6031

SEQ ID NO: 20100 - protein, 428 aa, unidentified
LKVFVLNMRGRPLMPCSPARARHLLKAGKAVVRRRTPFTIQLRIATGETKQSVTLGVDAGAKHVGLSAATEKEEVFASEVELRQDITGLLAARLSLRRDRRHRKTRYRAPRFLNRVRSKHKGWLAPSVENRIQAHMSRIDAVCRLLPVTRIVIETASFDVQKIRNPEVEGTGYQQGDQLGFWNVREYVLFRDGHICQHCRGRSKDPILNVHHLESRKTGGDAPNNLITLCETCHKAYHAGKIKLKVKRGQSFRAEAFMGIMRWTLLDRVRKAHPGLPVENTYGYLTKHTRITHGLPKTHCVDAYCIAGNLKAVRRGVYLHQRQMRKHNRQIHKFTVLSKRLEDGTKIGYRKLNQSPYLVHGFRLFDKVRCLGQIGFIFGRRSSGYFDVRRLDGVKLSPSISWRKLTLLEKRSTYLTELRKQDGASSPV

SEQ ID NO: 20101 - protein, 416 aa, unidentified
MEFVYVLDLNGAPLMPTRRFGNVRRMLRDKKAKVVRRKPFTIKLLYEPTTYIVQELTLGVDTGSTHIGAAVYGQHKIYYQSQTEIRNDIKKKMDERRGYRRQRRNLNTRYRKPRWLNRANSIKKCRFSPTMISKFNAHIREIEFIKKIMPIKTLVLETGTFDPHLMKHEGEAFNRHWGYQKGLNYGFANTKAMILNRDNYICQCCKGKHKDSKLEVHHIVFRSQGGSDEESNLITLCHTCHSNLHAGKLELKKVGKVKGQLKHATQMNSIRVQLLKHYSEAVETFGYTTKENRLGLGINKKDHYLDACVIASGGDWFLNNNKVFYKKVVRKGNRVLQMFRKVPIHLSKGRCFGFRRYDTVKFEGKEYFIYATSNSGSFIIQDIFGVKPEIEGKKTKGSVNWKDLKLVNSRRTVLCT

SEQ ID NO: 20102 - protein, 413 aa, Moorena sp.
MQNYVFVIDTNKQPLNPIPPKKARRLLDKGKAAVFRMYPFTIILKTAVDNPSGSPCQIKIDPGSQTTGFALVQNNQVIWGMELEHRGGFIKKKLESRKAVRRGRRNRHTRYRKPRFLNRKRSEGWLPPSLEHRVSTIETWVKRLTKFCPINEIWVERVKFDTQKMQKPEISGVEYQQGELAGYEVREYLLEKWGRECTYCGKQSVPLQIEHIQPKSFGGSNSAKPTLRERVSNLCLACEKCNQRKGNKPIEEFLKNKPILLQKIKTKTKQPLLDSAAVNTTRNKLVKVLQNILLVVTGTGAQTKYNRIKLGLPKQHWIDAACVGDIETLVLKTSQPLLVTCKGQGGRQKAALNKYGYPIRHNPLKPIKGWVTGDIAKHQKLGIGKVTPRSKGSFGFTPLGMKGYKSCKPQDIS

SEQ ID NO: 20103 - protein, 452 aa, unidentified; identical to SEQ ID NO: 14057

SEQ ID NO: 20104 - protein, 431 aa, unidentified
MDAWDIIVVLNKRGKPLMPCSPAKARLLLKEKKAIVKRRTPFTIQLTIATGETKQPVGLGVDAGYKHVGLSASTDKAELYASQVELRQDITDLLSARRALRRARRNRKTRYRAPRFNNRIRTKRKGWLAPSVENRINAHLSRIEAVLRLLPVTKITVETASFDMLLLKNPDIAGKEYQEGEQLGFWNVREYVLFRDGHVCQHCYGRSKDPVLNVHHLESRRTGSDSPDNLITLCETCHKALHRGEITLKAKRGQSFRAQAFMGIMRREVLNRLKASYPELKVHETYGYLTKHARIANGIVKSHGADAFCIAGNLGAERLGEFFFQKQTRRNNRQIHKLSILKGGIRKRNQAPFEAKGFRLFDKVACQGEEGFIFGRRSSGYFDVRKLDGTRISAGISYKKLRLLEKRRTYLTEIRKEEALPPLPEGRGLRA

SEQ ID NO: 20105 - protein, 411 aa, unidentified
RARRTNGRRCRRQRRAKANGTISKKCVKQATAQNGSVSKRANEIGVIKRHLPGCEKNVLCIGIKNKEAKFSNRTRPEGWLTPTANQLLQTHVNLVKKIQKFLPISDVVLEVNKFAFMRLDNPNVQKWQYQQGPLYQKASLEEAVSEMQEHHCLFCKNTIDHYHHVVPQHKNGSNTIGNIVGLCAKHHDLVHKDTSWQEKLAKKKTGLNKRYGALSVLNQIIPALTKELSSLFPKHFFATNGKSTYDYRAAHGVSKDHWLDAYCIAGSVLPNDACDNNINNRVPYELKQFRRHDRRALHKENMSRVYTLNGKSVATNRHKAIKQTTDSLEEFRQRQPNDVCKLKVKEHHPEYRNPKRNFPGCVFLVGKHTHVMQGTSGSHNGKADGYYDTNGNSYSSGKCKFVVKNEGIVFT

SEQ ID NO: 20106 - protein, 501 aa, Nonomuraea sp.; identical to SEQ ID NO: 3887

SEQ ID NO: 20107 - protein, 439 aa, Lactobacillus sp.; identical to SEQ ID NO: 16568

SEQ ID NO: 20108 - protein, 477 aa, unidentified
MIIALDKNKRPLGFLTERRCRILMERKRAVLYRVFPTVVILMDMDVRKLQDLPSYRIKIDPGSKYTGIAIVRNDTDELVYAMQIEHRGDAVRAGLQKRKMARRNRRSRETGYRRAKWGNRCLSDGDKKSYNSSRKDGWLPPSIRSVADNVLTWVQRLSRWVNITDCSLEAVRFDTQLLENPNIKGEEYQHGTLFGYEIREYLLEKFGHTCQYCGGKSGDSVLEWEHIHPKSRGGSDRVKNAILSCSSCNRDKDNQTLEEWIGQIRSRISREKGKRKELDSGRIERIQKVIDGKPEGQPMRYATWVSSSRRYLEKHLFQIFRDVECSSGGRTKYNRIRLGYSKEHHYDALCVGTVPEKGYHDRTNGYYLYAKATGRGTRLRGAVNQCGVIITKWTSRKKNFFGFQTGDIVVAEVPHKIPRPYKYEGRFVGRVMVRASGSFDIRTTDGKLATVKAGFCRLLQANSGCAYSMERTIPLDH

SEQ ID NO: 20109 - protein, 417 aa, Streptomyces sp.
MGHGPPLPAPAITLREVDPPMATFSAGQQIHRAVPPQRRALESAGADTPRIGHETARGRHISLAAPSGEHVREETVGGSPAPDGDTPRPAEAGEKPRERHPSVFVLDRHGAPLQPCHPARARKLLGKGRAVVARHTPLVIRLKDRTIAESTVEGVELGIDPGSRHTAIAVFTATGGERRGRFAVRLDHRGAQIRRKLQQRADFRHGRRTRSLRYRAPRHDNRARREGWLAPSLRRRVDTTVAWVDRLARWAPVTAVHVESVAFDTHAISSGGPLEGAEYQHGTLHGTEVREYLRTRCKRARGYRGATGVPLNVDHVRPPSRGGSDRVSSLVLACVPCNQEKANRPVEDRILNHLPKTHTLDALAVGELGAVTETDRQPCTDRRVHRAWHTRPDPQRRVRVPPSASASAEAIPRVHDR

SEQ ID NO: 20110 - protein, 411 aa, unidentified; identical to SEQ ID NO: 2663

SEQ ID NO: 20111 - protein, 451 aa, unidentified
MPVAVISKTGERLMPTSEHRARKLLKSGKAIKYSYHPFTIQLAERESGDVQPIELCMDTGYIHIGISVKSEKHEYLAEQIDTLTDEKARHDACRMYRRQRRSRKRYRQPRFNNRKRNDRWIAPSLEHKKSIHIQAILRICKVMPVTDITLEMGNFDTQVLKAREEGKPLPHGADYQHGERYGIATLREAVFTRDDYKCQCCGRTIKDGAILHVHHIKYRSQGGTNRMSNLITVCDKCHTPANHKQGGKLYNWKPKIASFKGATYMTTIRWKLYNEVKALFPDIDIHVTYGAETKERRRALDIDKSHVNDAFVMGQFHPKHRSKPICYKKKRRNNRCLEKFYDAKYIDSRDGKKRSGQELFNGRISRNHKKDSENLHQYRLQKVTPGRRAIRRQHYPIQPHDIIVYNGNKIEVSGCQHKGTRVVFSKTKKSVQISKIKLFKYAGGYSKSVFN

SEQ ID NO: 20112 - protein, 413 aa, unidentified; identical to SEQ ID NO: 3295

SEQ ID NO: 20113 - protein, 465 aa, unidentified; identical to SEQ ID NO: 8068

SEQ ID NO: 20114 - protein, 440 aa, unidentified
VGVPQQCEIFYERIYMVFVLDKSKKPLDMISNAEARILLRKKLAVIHKVYPFTIRLRDNSCGSDDKTYTVKIDPGSKTTGIAIVDNKDSVVMLAEIEHRGHIVKKNMDSRRAVRRSRRNRKTRYRPARFLNRTKPKGWIAPSIKSRADNVINFIKKYKKLININKVMIENVSFDVAQMSSDDNLVGIDYQQGPLYDTNLREFIFSKTNGRCSYCGAKATEIDHIVPRAKGGTDSTYNLIPACKSCNEKKSNLSLKEFGKLMNKDFSHLKPKRLPKDAAIVQSARNYMIREITKLVSDATIHDSWLTKYNREQLGLPKEHYYDALSVGEVPSRFNFLTDKVLQISAKGRGSRQMCRVDKYGFPRTSAKASKIVEGFQTGDMVKAIVPKGPKAGEYLGRVAVRSRRKFDIKTKSGLVKDIWYKHFYLIQRSDGYLYSYKERS

SEQ ID NO: 20115 - protein, 414 aa, unidentified
MVYVINKQGQALMPTERFGKVRRLLKNSLAHVVCRIPFTIQLDYDTTDYTQPVSLGVDAGSKHIGISATTSEKELYAADVELRNDIVDKLSTRRELRRTRRSRLRYRKARFNNRVSSKRKGWLAPSVENKIQTHLTVVENIHKFLPITNIVVETASFDIQKINNPSISGSEYQQGEQLDFFNVREYVLFRDNHICQHCKGKSKDKVLNVHHIESRKTGGDSPKNLITLCETCHKAYHRGEFKLNIKRGKSFRDSAFMGIMRWSFYNRLKNIYPNVSMTFGYITKNTRITNNLPKDHYVDARCISGNPVAKPLGYYFYQKKVRCQNRQIHKANFLKGGRKKLNQAPFLVKGFRLFDLVEYQKELYYIFGRRSSGSFDIRKLDGTKVNKGSINCKYLRLIDTRKSILIEKRTQVNL

SEQ ID NO: 20116 - protein, 415 aa, unidentified; identical to SEQ ID NO: 2744

SEQ ID NO: 20117 - protein, 544 aa, unidentified; identical to SEQ ID NO: 19655

SEQ ID NO: 20118 - protein, 480 aa, unidentified; identical to SEQ ID NO: 18342

SEQ ID NO: 20119 - protein, 420 aa, unidentified
MQYVYVLNKHGEPLMPCSPRKARLLLKQKKACVIKRTPFTVKLLHGSAGYKQTVTLGVDAGSKHIGISATTEKHELYREEATPRNDVVDLLSARRAFRRSRRNRKTRYRAPRFNNRVHSKHKGWLAPSVEVKIQEHITLIKHVFRILPVTLVRVETAEFDTQRLKAMLEGKPLPVGTDYQLGEMYDEYNVRQYVLKRDNYTCQCCGAHSTKTKGVKLHVHHIETRRTGGNAPNNLITLCKACHKALHAEKVTLDGKKRGKPLKNAAFMGIMRKTLMERLRKELKIPVQGTYGYITKYLREKNGIPKSHTNDARCISKNPLAIPCDTCYYTKAVRHHNRQLHKATILKGGIRKANQAPYIVKGYRLWDKVAYNGTECFITGRRTSGYFALKELDGTVVSNSISYKKLRLLEAATNYITERK

SEQ ID NO: 20120 - protein, 512 aa, unidentified
MATVYVLSKTGKPLMPTTRCGHVRILLKQKKARVVSLKPFTIQLLYDCEEGTQPIVLGIDPGRTNIGLSAVRKDTGEAVFTAQMETRNKEIPKLMKDRRAFRRKHRSYGRRKVRQRRASAHDTNSPKCAKQKTAQNGGVSKQAQKVGVIKRHLPGCEEPVICIGIKNKEARFNNRLRPKGWLTPTANHLLQTHITVVNKVRRFLPITDVVLEVNKFAFMALDNPHVQKWMYQHGPLKGYGSVEEAVSVQQDGHCIFCKNEIANFHHIVPQSKRGSNTIGNVVGLCSEHHELVHKDSTWEQKLKTKKQGMNKKYGALSVLNQIIPRLCDTLTNMYVEHFYVTDGQSTKAFRNEHDIRKDHYLDAYCIACSVLSSSCRSNVPDEKDVFHIMQFRRHDRRACHQERVDRKYYLEGKLVATNRHKAIEQKNDSLEEYVAAGGCVDKLFAPKHPPLYRRKGRIMPGTVFLVGNKTKMMIASQGTHNGVPNYYRFTDGSRATPKNCKPIYQNTGIVFV

SEQ ID NO: 20121 - protein, 430 aa, unidentified
  source 1..430: note = Spirochaetales bacterium UBA6368
MVYVLNIHGQPLMPTTRYGKVRRMLKEKQAKVIKRCPFTIQLLYENPNFVQEVSLGVDAGSKTIGISATTPTSELYAAEVKLRTDVVTNLSSRHECRRSRRNRKTRYRQKRFDNRKVNKQNGWIAPSICNKIVTHLTTVDKITKILPVSEIHVEVASFDIQKIKNPDITGIEYQQGEQLDFWNVREYVLFRDQYTCMCCKGRSKDKILNVHHIESRKTGGDAPNNLITLCETCHNDYHNGTIQLPKTIKRGMSFRDATFMGVMRWAFYNKVKEIYEAKGIPVSLTYGYITKNLRIKNNLPKTHYVDARCISGHSNVEPLGYYFLQKKVRCHNRQIHKLKFMKGHYRKRNKADYEILGFKLFDKVLFQNIECFIFGRRSTGRMDLRKLDGTHINASANYKNLKLLENSKHILTERRTGRFLPVASNRVSTS

SEQ ID NO: 20122 - protein, 419 aa, Geobacillus sp.; identical to SEQ ID NO: 2623

SEQ ID NO: 20123 - protein, 351 aa, unidentified; identical to SEQ ID NO: 10636

SEQ ID NO: 20124 - protein, 423 aa, unidentified; identical to SEQ ID NO: 4062

SEQ ID NO: 20125 - protein, 418 aa, unidentified
MIYVRSKEGKALMPSERGGRIGYLLRHGKAHVVSRVPFVVQLDYESTTYTQDVSLGIDAGSKHIGVSASSERKELLAAQVELRSDVVNLLSTRRELRQTRRNRKTRYREQRFYNRKKKDGWLTPSVEQKVESHLKVIRLVHKLLPITKTTIEVAQFDAQKIKNTDIKGNEYQQGEQMGFWNVREYVLARDGHKCVHCKGKSRDPILNVHHLESRKTGGNSPSNLVTLCETCHKAYHRGEFELKIKRGTTLRDAAVMNIMRWAVYEQAKEEFRNVHLTYGYVTKHTRIENGITKTHAADAFCIAKNVHAIRLGTFFMCRCVPRHTRALHVANPKKGGIRRSCIASHKIGKSRFQRFDMVLWKGKECFIFGSTKGRPVLRDIKGIKMHENNSVNIKTISFLKRLRKNIIVEERTFESRII

SEQ ID NO: 20126 - protein, 450 aa, unidentified; identical to SEQ ID NO: 2935

SEQ ID NO: 20127 - protein, 509 aa, unidentified
MPDTDYIYVLGADGKPQMPTKRKRHVKRLLDTGKARIACHVPYTIQLLYENTPVLQPVMLAEDPGRTNIGMAVLSVKGELLMSAVVETRNRKIVRLMNHRRGYRRASRNGERKARQRLAKRFSTMLKAGMLMRKLPKFAADKFITCHYIRNTESRFCNRKRPDGWLTPTSRQLVETHINLIHKIQKYLPVTDIAMEVNRFAFLSLENPSVSGVDFQNGPLKGFDSLHDAVNELQHGKCLLCDKKIEHYHHIVPRFMNGSNTIGNIAGLCMECHNKVHKRAAYQKKLNDVKKGLDKKYGALSALNQAVPFICKRLEAEFGKEHVSYCTGRDTAKMRSSFGFQKTKDNQMHETDAWCIGILALNRIPDVVPNFGQTYCIRQFRRQDRSFVYAQTERVYKLDGVIVAKNRKKRTEQKTDSLEDWYNRQVVLYGKKKADFMRSRLTAVKSKRRYNDLTHVMPGAIFMYNGERYVLSGRLSKGLLFRAVGDAKTNYPASKCKIIRHNEGLVFVC

SEQ ID NO: 20128 - protein, 420 aa, unidentified; identical to SEQ ID NO: 6416

SEQ ID NO: 20129 - protein, 406 aa, unidentified
MVYVQDIDGKPMMPTTRHGKVRRLLKDSKAVVVNTCPFTIKLMYKTSGYKQEIVLGVDAGTKHVGLSATTKSKELYSSEVILRSDIVELLSTRRELRRTRRNRLRYRKPRFDNRIKSKRTGWIAPSVRHRIDAHIRIINNVCSILPISRIIVEIAQFDTQKIKNPDISGNEYQEGDQLGFWNVREYVLARDGHKCQHCKGKSKDPILNVHHIESRKTGGDSPSNLITLCETCHKEYHKGNIDLKVKRGKSLRDAAVMGIMKWKLYDELKSRCDNVSMTFGYITKYNRIKYGIEKSHTSDAFVISRNFNAKRIERQYLKRLIRRHNRQIHKMKILKGGKKKNNQAPFEVFGFRLFDKVLYNNEILFVYGRRKSGNFNIRDFNGENPKDVSHKKLKLIRGKRHLIILK

SEQ ID NO: 20130 - protein, 442 aa, unidentified
MSTSVFVLDKKHRPLMPCRPARARRLLRVGRARVVKRFPFVIRLVDRTVEQSEVQPVLIKLDPGSRETGAAVVRDDEKKRHHALAFFVIKHRGGAIRDALKARSAFRRRRRSQNFRCRSPRFLNRVKPKGWLPPSLRHRVETTLSFVRRMCRYLPVSGIAAELVKFDSQKLQTPEVSGIEYQQGTLFEYEVREYLLEKFGRKCVYCGAEGVPLNIDHVVPRAKGGSNRVSNLVLACMSCNQKKGARSLEDFLKGKPKVLARVRRELKTPLRDAAAVNATRWVLFNELKATGLPVETGSGALTKLNRHAFGVEKEHWLDALCVGRLNGVVTRKGLNVLEIRCMGRGSRQRTRLTKYGFPRGYLMRQKCVHGFATGDMVEANVPKGKKAGLWRGRVAVRVSGSFNIQTPKGVIQGVGWKHCRLISHNDGYGYAWLGHAPHSSPA

SEQ ID NO: 20131 - protein, 420 aa, unidentified; identical to SEQ ID NO: 10448

SEQ ID NO: 20132 - protein, 414 aa, unidentified; identical to SEQ ID NO: 2856

SEQ ID NO: 20133 - protein, 427 aa, unidentified; identical to SEQ ID NO: 3216

SEQ ID NO: 20134 - protein, 424 aa, unidentified; identical to SEQ ID NO: 8578

SEQ ID NO: 20135 - protein, 420 aa, unidentified; identical to SEQ ID NO: 6507

SEQ ID NO: 20136 - protein, 477 aa, unidentified; identical to SEQ ID NO: 2707

SEQ ID NO: 20137 - protein, 330 aa, unidentified
MVYVQDIDSKPMMPTTRHGKVRRLLKDNKAVVVNTCPFTIKLTYKTSDYKQEIVLGVDTGTKHVGLSATTKSKELYSGEVILRSDVVELLSTRKELRRTRRNRLRYRKPRFDNRIKSKRTGWVAPSVRHRIDAHIRVIDNVCSILPISRIIVEVAQFDTQKIKNPNISVNEYQEGNQLGFWNVREYVLTRDGHKCQHCKGKSKDPILNVHHIESRKTGGDSPSNLITLCETCHKEYHKGNIDLKVKRGKSLRDAAVMGIMKWKLYDELKSKYDNVSMTFGYITKYNRIKYGIEKSHISDAFVISKNFNALMLEYHYKVRLVRRHNRQIHK

SEQ ID NO: 20138 - protein, 447 aa, unidentified; identical to SEQ ID NO: 12599

SEQ ID NO: 20139 - protein, 420 aa, unidentified
MVYILNKHNEPMMPCSERKARLLLKQGRAVIYRKDVFTIKLINGSYGYKQHITLGVDCGSKHIGVSATTDKQELFSANAELRNDVVKLLSDRRMLRRSRRFRKTRYRKPRFDNRRIKEGWLAPSIRQKIDSHVRIVSLIHKLLPVKQVNVEVAAFDMQKIKNPDIKSSEYQMGEQLDSYNVREYVLFRDNHICQHCKGKSKDDVLQVHHIESRKTGGNAPNNLVTLCKTCHEKYHSGEITLNVNRGKSFRDAIAMSTMRWFLYEELKSRFSNVNITYGYITKYKRIKLGLSKEHYNDAYCIAGNLNTSRLCNHHLIRFIPRHSRILHVQKFSKGGVRRSASAPYWLNGGKPSKHGIIFTRFDKVKFNSVVCFISGSSNGFASLRDINWNKVYGCKTTVTVNKLALVSRRRGSMLFGELCG

SEQ ID NO: 20140 - protein, 512 aa, unidentified; identical to SEQ ID NO: 9077

SEQ ID NO: 20141 - protein, 457 aa, unidentified; identical to SEQ ID NO: 9139

SEQ ID NO: 20142 - protein, 419 aa, unidentified
MVYVISQDGKPLMPCSDPIARLLLKQGKAKVKKREPFTIKLTYETTNYTQGLTLGVDTGSGTIGTAVSKDNGDIVYMSEVVVRNDITDKMTQRAKYRRNRRNRKTRYRKARWLNRASSIKKDRFSPTMQSKLHSHVREIEYIQSILPITEMVFETGQFDMQLMKNPSLANPKVRPWGYQKGANYGFENTKAMVLNRDNYTCQCCKGKHKDSKLEVHHIVFRSQGGSDEESNLLTLCHTCHKDLHSGKINPKLSGKLKGNLKYATQMNSIRKQLFRFYPNAIETFGYVTKANRLHLGVDKEHYYDACTIATQGNAFNVKSNLYKKKCVSDGDFQKTKGIRSEEPIVTDKICGFRKFDKVRYFGNDYFIKGRMSTGYAILMDIDGNKIDFSTMPRGYKTPKLSNCKRITARSTVMTQVKVV

SEQ ID NO: 20143 - protein, 397 aa, unidentified
IVKRRTPFTIQLTIATGETKQPVSLGVDAGYEHVGLPASTEKAELYASEVELRQDITDLLSARRALRQSRRNRKTRYRAPRFDNRIRTKRKGWLAPSVENRIDAHLSRIEAVLRLLPVTKITVETASFDLQLLKNPDISGKEYQEGEQLGFWNIREYVLCRDGHVCQHCYGRSKDPVLNVHHLESRRTGGDSPGNLITLCETCHKALHRGEITLKAKRGQSFRAEAFMGIMRSEVLNRLKASHPELEVNNTYGYRTKHARIANDIAKSHCADAFCIAGNLGAERLGEFFFQKQTRRNNRQIHKLSILKGGIRKRNQAPFEVNGFRLFDKVACKGEEGFIFGRRSSGFFDVRKLDGTRISAGISCKKLHLLEKRRTYLTEIRKEEALPALPEGRGLRA

SEQ ID NO: 20144 - protein, 439 aa, unidentified
MVLVIDKHKKPCNTISNAYARVLLFKKQAVIHKRFPFTIRLKNDNAVLKDKSYTVKLDPGSKTTGIAITDDKDSVIMLAELEHIGHLIKKDLNSRRIVRKSRRQRKTRYRPARFLNRTKPKGWLAPSVRSRADNVINFIKKYKKLINIDKVMIENVSFDTAQMSSNSKLYGIKYQQGPLYQNKLRSFIFSRSNDKCVYCGAKATEIDHVIPRSSGGTNSIYNLVASCRNCNQMKSNLTLKAFGKKMNKNYSHLEPKKLPKDAAIIQSSRNYMVKEITKLVSNITLHDAWMTKYNREELGLPKEHYYDALSVGEVPNKFNFLTDKILQISAKGRGSRQMCRMDKYGFPGTKPKGSKLVKGFQTGDMVKAVVPSGLNAGKHLGRVIIKSSGYFEIKSKNSSVQGINHKYCRLIQKGDGYLYNYKESDFLSAIAKRVMICLH

SEQ ID NO: 20145 - protein, 544 aa, unidentified
MKQKKQKVMVYILNKKGKPLMPTTRCGHVRKLLNSKKAVVVNSNPFTIRLKYDTPNGVQDVFAGIDSGRENIGSGVSNEDGDCLYLGELKTSNKSIKIKMAERTGFRRERRRHDRQSKQRKAKKDHTEIQNGNDDICRTTISCKSVQISYPAAEESVTHKIIRGKEGKFANRHRDEGWITPSARQLVQMHMNDLKSMCKILPISHVTLERVAFDFQKLENENIKVWEYGKGKLYGYDSPEEYIHDVQDGKCLVCGKPHIDYLHHIIPRSKGGSDKVSNLAGLCYDCHYGPMGVHNCRETQDRLPELKNEANKQYKVNLLNSVMPVLIEEMDKFCKANSIIFSICEGHDTAKVRDMYDLQKDHCIDGFAISLVDRNVKSVDVMPDRIYQKQRYKKKSKNIIQKRNCREYYDGKKLVAVNRHKGTDQKADSLEEYMNTYAETHTADECKKHFDSLTVKPARRTYTFHKEGRICPLHIGDKVRYEKKNKIKGNTKVDTFICEGIYFSKDENKAEVEHNKTKSKKMKFCRAIESGCIPYIDYIKLALI

SEQ ID NO: 20146 - protein, 469 aa, unidentified; identical to SEQ ID NO: 9984

SEQ ID NO: 20147 - protein, 444 aa, unidentified
MAVFVIDRRQAPLMPCSEKRARLLLARGRARVHRLIPFTIRLIDREVAQSELQPLELKIDPGSKTSGLALVRNNDTVNAETGKITATAHVLNLFELTHRGFQISKALTARSQMRRRRRSANLRYRAPRFLNRKNKGEGWLAPSLQHRIDTTLSWVARIRNVAPITHLAQELVRFDMQQLENPEIAGVQYQQGELRGYEVREYLLEKWHRQCAYCDVSEVPLQIEHIHPKARGGSNRVSNLTLACAPCNLKKAAQDITQFLAKDPKRLTKIQAQAKRPLRDAAAVNATRWKLLNALKGLGLPVRTGSGGLTKFNRSRLVIPKTHALDAVCVGEVDFVEQWQKPTLVIKATGRGSYQRTRLNRFGFPRGYLTRQKRIHGFQTGDRVKAMVTKGKKVGTYMGRVAVRASGSFNIQSAEGLVQGISHRYCTLIQRSDGYGYSLRSDSN

SEQ ID NO: 20148 - protein, 470 aa, unidentified; identical to SEQ ID NO: 7775

SEQ ID NO: 20149 - protein, 414 aa, unidentified
MPCSPAKARLLLKEKKAIVVRRTPFTIQLTIATGESKQPVSLGVDAGYKHVGLSASIEKAELYASEVELRKDITDLLSARRALRQSRRNRKTRYRAPRFDNRIRTKRKGWLAPSVENRINAHLSRIEAVLRLLPITKITVETASFDMQRLKNPDISGKEYQEGEQLGFWNVREYVLFRDGHVCRHCHGRSKDPVLNVHHLESRRTGSDSPDNLITLCETCHKALHRGEITLKAKRGQSFRAQAFMGIMRREVLNRLKASYPELKVHETYGYLTKHARIANGIVKSHGADAFCIAGNLGAERLGEFFFQKQTRRNNRQIHKLSILKGGIRKRNQAPFEAKGFRLFDKVACQGEEGFIFGRRSSGSFDVRKLDGTRISAGISCKKLRLLEKRRTYLTEIRKEEALPPLPEGRGLRA

SEQ ID NO: 20150 - protein, 430 aa, unidentified
MPKVYVLNRHGRPLMPCTPAKARHLLDAGKAKVRHRTPFTIQLLYGSTGYAQEVILGVDAGSKTIGLSASTETEELFSAEVKPRNDVVELMSARRQFRRARRNRATRYRKPRFDNRVRSKHKGWLAPSVEVKIQEHMTAIRRACAILPVSKVVVETAEFDLQLLKAVAEGKPVPQGEDYQKGEMYGHYNVRQYVLWRDSYTCRICGVHGSVRKGVPLHVHHLESRRVGGDAPDNLVTLCTACHDKLHKGIIMAADIKKRKRRSTRDATFMGIMRMTLLRRLREQLPVPVVETRGYITKATRENLLVLPKSHTNDALAIAHGPQGFRAEYLPNIRQADRLYTIRPVRHHNRQLHKATILKGGVRKANQAEKYICGFRLYDKVLYNGIECFVWGRRTSGSFLLRQLNGEKVKDGVSYKHLKLLERSQSYLVA

SEQ ID NO: 20151 - protein, 416 aa, unidentified; identical to SEQ ID NO: 9725

SEQ ID NO: 20152 - protein, 426 aa, unidentified; identical to SEQ ID NO: 7828

SEQ ID NO: 20153 - protein, 443 aa, unidentified; identical to SEQ ID NO: 11672

SEQ ID NO: 20154 - protein, 507 aa, unidentified
VLNKDGKPLMPTTRGGHVRHLLKEQKARVMRTKPFTIQLLYETDDVVQPLYLGIDPGRTNIGVAVVKTDGTAVFTAHLETRNKEIPKLMKKRKDSRRARRTNGRRCRRQRRAKANGTISKKCVKQDTAQNGSVSKRAKEIGVIKRHLPGCEKEILCIGIKNKEAKFNNRTRPEGWLTPTANQLLQTHINLVKKIQKFLPISDVVLEINKFAFMQLDNPNIQKWQYQQGSLCQKANLEEAVSEMQEHHCLFCKNPIDHYHHVVPQHKNGSNTIDNIVGLCTKHHDLVHKDTVWQEKLAKKKTGLNKKYGALSVLNQIIPALTKGLSSLFQKHFFVTTGKNTYDYRAAHSVSKDHWLDAYCIACSVLPNDVCDNSINSRVPYELKQFRRHDRRALNNENISRVYTLNDRKVAINRHKAVEQTADSLEEFRQNHPDNVCKLKVKEHHSTYRNMNRNYPGSVFLVGKQVHIMQGIAGSKDGKSTKYNDTNATTIAAGKCKFIAKNSGILFV

SEQ ID NO: 20155 - protein, 418 aa, unidentified; identical to SEQ ID NO: 20125

SEQ ID NO: 20156 - protein, 462 aa, unidentified
MSVLVIGSNGRALMPTNPRKARLLLKKKTASVVCRHPFTIQLLYKTGCATQEGSIGIDTGSQHIGVGITCGDKVILKDEHALRSSMEKRSLLVARAAMRRGRRYRKVRYRKPKWRHHTKRMYFEKPNRRGQHWRKVKTTTQSPRPKGWLPPSLQSKCDHHFRIIDRYLKYLPDPITRNLVIETGRFDMARMNDPTIHGEMYQRGPMYDAENLRAYIFARDNYQCACCKAKAGTTRKADGTTVKLVAHHILFRSRGATDNPKYIISVCDHCHTTKAHQPGGVLYSWMENNKKVTRGLRDATFMNILRKRLFARYPQAAFTYGNITAADRKQLRLPKSHANDAVAISLLGKEASTVKNICQTMHYKQIRKSKRSLHEAIPRKGRKNPNTKAVRNKKNTTQVNGFKLWDSVLANGKKLFICSFTGTSAYLIDKNGCYISQPGKTYKQWPLSKLKRLHPNGNWLMA

SEQ ID NO: 20157 - protein, 460 aa, unidentified
  REGION 1..460: note = IscB polypeptide
MSKQTLQREFKNVPTGAPLACSSTSTPLNRLETVSVVSKVLSCNNPEVGQRKQVSGLKVTVPVLSITGSPLMPCSLAKARHLLERRRAKIVNLNPFAIKLTFDCENKVQEVSLGIDTGYRHIGFSAITEVKEIVSGEVELDDKTSKRLTERRMYRGHRRSRLRYRKPRFNNRKTSEGWLPPSIQRRLDTHINMVNKLKELTPVRKVTVEIGAFDIQKLMDPEISGKEYQHGDLYGYNNLKAFLFSRESGKCQLCNKKIVKGEKAHLHHIKPRSETGTDRPSNIALLHENCHDKMHKKKLYKKLKGPKEYKAETFMSIMAARLKKALDCDVTYGYETATKRNLLRIEKSHVNDALVIAGGTNQERCLPYKVEQKRINNRVLQTNRKGFIPSIRKKRHSIQNRDFVWINNKRYLCGGVASRGAEVYYFERSGKKLINTKKIEKVYHTGSMVWISGVVFTELV

SEQ ID NO: 20158 - protein, 390 aa, unidentified
WFFIRKKRASLVSKYPIVIQLMKEIPEKEICQDEIRCGIDDGGLHVGIALVQKCKTKNKVVFKGTMEQRNDVKHLMEVRRGYRRYHRYHKRYRQARFDNRKSSKRKERIAPSILQKRQATIRVINWLNKWINITNYWLEDVSVDIRALTDGYQSYRWQYQKSNRLDENIRKAAILRDGGKCMECGKSNCRLEVHHIKPKRRNGSNTLDNLITLCESCHQKTEGQEELYMDRYFSLLKSSDNKNLNYAQHVMIGKMWLRKQLSGLGVLYLTSGGDTANKRIDWNIEKSHANDAVCITDLRPDTCDVKEWTMKPMRRQSKAKTDHVLGIHHRDLVEYTFKNGETHRGYVTALYPEQKAINFQSPTKHCKKVNARKCKLLWKYSKIYWFENAS

SEQ ID NO: 20159 - protein, 411 aa, unidentified; identical to SEQ ID NO: 3917

SEQ ID NO: 20160 - protein, 509 aa, unidentified
MPDTDYIYVLGADGKPQMPTKRKRHVKRLLDTGKARIACHVPYTIQLLYENTPVLQPVMLAEDPGRTNIGMAVLSVKGELLMSAVVETRNRKIVRLMNHRRGYRRASRNGERKARQRLAKRFSTMLKAGMLMRKLPKFAADKFITCHCIKNTESRFCNRKRPDGWLTPTSRQLVETHINLIHKIQKYLPVTDIAMEVNRFAFLSLENPSVSGVDFQNGPLKGFDSLHDAVNELQHGKCLLCDKKIEHYRHIVPRFMNGSNTIGNIAGLCMECHNKVHKRAAYQKKLNDVKKGLDKKYGALSALNQAVPFICKRLEAEFGKEHVSYCTGRDTAKMRSSFGFQKTKDNQMHETDAWCIGILALNRIPDVVPNFGQTYCIRQFRRQDRSFVYAQTERVYKLDGVIVAKNRKKRTEQKTDSLEDWYNRQVVLYGKKKADFMRSRLPAVKSKRRYNDLTRVMPGAIFMYNGERYVLSGRLSKGLLFRAVGDAKTNYPASKCKIIRHNEGLVFVC

SEQ ID NO: 20161 - protein, 490 aa, unidentified; identical to SEQ ID NO: 3566

SEQ ID NO: 20162 - protein, 426 aa, unidentified; identical to SEQ ID NO: 11153

SEQ ID NO: 20163 - protein, 424 aa, unidentified; identical to SEQ ID NO: 5075

SEQ ID NO: 20164 - protein, 339 aa, unidentified
VDAGSKTIGLSASTAKEEVFAAEVMPRNDVVENLSTQREFRRARRNRTTRYRKPRSDNRVRSNHERWLAPSVKVKIQEHITSIKRVRTILPISKVVIETAEFDLQLLKAIQEGKPIPEGEDYQKGEMYGSYNVCQYVLWRDNYTCICCGVRGTPKNPVRLHVHHFESRKYGGNAPDNHGTLCDDCHKKFHLGIITDVKLKTRRRQSTRDAAFMGIMRKTLMWRLRTELFIPVAETKGYITKATREKLLVLPKSHTRDALAIAQGRHGFGIKEYAYVEPANHIYTVRPVRHHNRQLHKASILKGGIRKRNQASKYIFGFRLYDKVLYQGKACFVWGRRTT

SEQ ID NO: 20165 - protein, 413 aa, unidentified; identical to SEQ ID NO: 3023

SEQ ID NO: 20166 - protein, 195 aa, unidentified
MICIVLCIIANARTKHVGLSATTKSKELYSSEVLLRNDIVDLLSTRRELRKTRRNRLRYRKPRFNNRIKSKRSGWIAPSVKYKVDAHIRVIDNVCSILPIFRIVIEVAQFDTQKIKNPNISGKEYQEGDQLGFWNTREYVLARDGHKCQYCKGKSKDKILNVHHIESRKTGGNPPSNLITLCETCHKEYHKGNYF

SEQ ID NO: 20167 - protein, 455 aa, unidentified
VIKSSEGKERCPLHQTPSNIDEGCLLPERAWRQNLRVFVINQRGKPLMPCSPAKARVLLREKKARVKRRTPFTIQLTTATGEARQDVSLGVDAGYRHVGLSASTEKAELYASEAVLRDDITDLLSARLALRRARRNRKTRYRAPRFSNRVHSKNKGWLAPSVEHKIASHLKLVENVCRLLPVTNITVETASFDMQAIKNPDIKGTEYQQGEQLGFWNVREYVLWRDGHQCQHCRGKSGDPILNVHHLESRRTGGDAPNNLVTLCETCHKAYHAGRIDLKLKRGRSMRAEAFMGIMRWTFFYRLKEIHADKTVENTYGYLTKHTRITHGIEKSHCADAYCIAGNLSAERLPEYLYQKQVRKHNRQIHKLTIGRGGIRKRQQTPFEVKGFRLFDKVRLGGEEGYIFGRRSSGYFDVRRLDGQKLSAGVSFKKLHLLEKRKTYLTVLLPRLKTKVSAP

SEQ ID NO: 20168 - protein, 413 aa, unidentified; identical to SEQ ID NO: 19628

SEQ ID NO: 20169 - protein, 453 aa, unidentified
MLMAVAVVSRTGVPLMPTSPYRARKLLASGKAEKYGYDPFTIRLTERETGDTQPVELCMDTGYIHIGVSVKSEKHEYLALQIDTLTDEKKKHEKCREKRRNRRSRKRYRKPRFDNRKRDKGWLAPSLEHKKEIHVRAAERICRVVPVTDITMEMGNFDTQVLKAREEGCPLPQGTDYQQGERYGTATLREAVFSRDNYTCLCCGRTMKDGAYFHVHHIQYRSQGGTDRMANLATVCEKCHTPANHQPGGKLYNWKPEIKSFKGATFMTAVRWQMYREIKEKIPDVSIHLTYGAATKERRRALDIEKSHVNDAFVMGRFHPGHRARPELYIKKRRNNRVLESFYDARYIDSRDGKRKPGKELFNGRISRNHKKDSENLHKYRLRKVSKGKRSIRKKHYPIQPHDILVYCGRKYETAGCHNLGTGAILLPERRSIAVSKLKIYRYSGGYYKAEFN

SEQ ID NO: 20170 - protein, 400 aa, unidentified
AKIKKRTPFTIQLVYGSSGYTQEVILGVDAGSKTIGVSALTKKEELFAANVIPRNDVVDLLSTRREFRRARRNRKTRYRKPRFDNRVRSKHKGWLAPSVEVKIQEHITAIRRVCGILPVSKVVVETAEFDLQLLKAIADGKPVPQGEDYQKGEMYGHYNVRQYVLWRDDYTCQCCGAHATKKKEVRLHVHHLESRKTGGDASGNLVTLCESCHEKLHKGLITEDDFKKRKRKSTRDATFMGIMRATLLQRLRSELPIPVVETRGYITKATREKLLVLPKSHTNDALAIAQGKHGFNVGYLPGIAQIDKIYTIRPVRHHNRQLHKATILKGGIRKSNQAEKYVFGYRLFDKVQFNGQDCFIWGRRTTGIFTIKTINGKMIKDGISFKKLKPVEKSTSYLIA

SEQ ID NO: 20171 - protein, 512 aa, unidentified
MSTVYVLNKDGKPLMPTTRGGHVRYLLKEKKARVVTSKPFTIQLLYETDDVVQPLYLGIDPGRTNIGVAVVKTDGTAVFTAHLETRNKEIPKLMQGRKKARRARRTNGRRCRRQRRAKANGTISKKCVKQTTAQNGSVSKRAKKIGVIKRHLPGCEKKVLCIGIKNKEAKFSNRTRPEGWLTPTANQLLQTHINLIKKIRKFLPVNDVVLEINKFAFMQLDNPNIQKWQYQQGPLYQKASLEEAVSEMQEHHCLFCKQSIVHYHHVVPQSENGSDTIGNIVGLCTKHHDLVHKDTAWQKKLAKKKTGLNKKYGALSILNQIIPALTKELSSLFPKHFFATNGKSTHDYRAAHDVSKDHWLDAYCIACSILPNDTCDKNINGRVPYKLKQFRRHDRRALHNENMSRVYTLDGKKVATNRHKAIKQTTDSLEEFRQRQPNDVCKLKVKEHHPEYRNPERNFPGCVFLVGKHTHVMQGTSGSHNGKADGYYDTNGNSYPSGKCKFVAKNKGIVFA

SEQ ID NO: 20172 - protein, 436 aa, unidentified
  source 1..436: note = Candidatus Gottesmanbacteria bacterium
MSNVLVMDTNKQPLRPCHPAVARILLKHGKAAVYRQFPFTIILKYEVTGPVEPLRLKIDPGSKTTGMAIVDDATGEVVWAAEIEHRGQRIRDRLLARRQLRRGRRNRKTRYRKPRFDNRRRREGWLPPSLESRVANVETWVNRLRRWCALGNLSYELVRFDTQQLQNPEVNGVEYQQGELLGYEVREYLLEKWQRQCAYCGVENVPLEVEHIVPKSRGGSNRVSNLTLACVPCNGKKGNQTAAEFGFPEIQAQAKHPLKDATVVNATRWALYRRLAALGLDIEVGTGGRTKFNRTRQGLPKAHWLDAACVGASTPELQLNGTSPWAVKAKGWGQRQMCRMDRYGFPRTGAKQAHRVHGFATGDLVQAVVPTGKKQGVHVGRVAIRTQGTFRVGVVDGINWRYCTRRQAGDGYDYTKEGARLPPTLERRGFPSREFL

SEQ ID NO: 20173 - protein, 512 aa, unidentified; identical to SEQ ID NO: 4545

SEQ ID NO: 20174 - protein, 544 aa, Streptomyces sp.
MTTFLAGEQTHRAVLPQQPALESASADTPGSRDETAHGLPAAMPGTGTEHGRGETGGVRTGTRRRHARSAVSTAETAETGSDDAPRPAASRVFVLAKGGEPLMPCHPARARELLAGGRAVVARRAPFTIRLKHRTRAGSAVEGVQLRLDPGSRATGIAITDERHRIGPTGRTAVARRGLITIELRHRGQQIHGGMVRRAAYRRRRRSANLRYRAPRHDNRPRPDGWLPPSLRHRIDSTMAVVVRLCRYAPVLEIHVEQVAFDTTAFAGVMPSGTQAGVESTYGASEVREFLLAKWKRSCAYCDATGVPLNIDHVRARSRGGSDRVSNLVLACIPCNQAKGTAPVQEFLADRPARLERVIAQLRRPLQDVAATNATRLQLVKALAAQGVPVHAWSGGRTHWNRLAMGLPKSHTLDALATGVIDRARGDALVRVPAQILVVASTGRGSYARTTPDRFGFPRLQRPRGKVHHGYSTGDLVAAVVPKGKWAGSWVERVAVRTSGQHRITTLTSRFDVSHRNLRLLQRADGYTYAFADEIRLSGRHRPA

SEQ ID NO: 20175 - protein, 448 aa, unidentified
MSTGLRAVQAEPAGIRKGDALKVFVLNMRGRPLMPCSPAKARHLLKAGKAVVRRRTPFTIQLRIATGETKQSVTLGVDAGAKHVGLSAATEKEEVFASEVELRQDITGLLAARLSLRRDRRHRKTRYRAPRFLNRVRSKHKGWLAPSVENRIQAHMSRIEAVCRLLPVTRIVIETASFDVQKIRNPEVEGTGYQQGDQLGFWNVREYVLFRDGHVCQHCHGHSKDKILNVHHLESRQTGGDAPNNLITLCETCHKACHAGKIKLKVKRGQSFRAEAFMGIMRWTLLDRMRKAHSGLPIENTYGYLTKNTRITLGLPKTHCVDAYCIAGNLKAVRRGVCLHQRQVRKHNRQIHKCTVLSKTLKDGTKIGYRKLNQTPHLVKSFRLFDKVRCLGQTGFIFGRRSSGYFDVRRLDGVKLSSGISYRKLTLLEKRSTYLTELRKEDGASSPV

SEQ ID NO: 20176 - protein, 414 aa, unidentified; identical to SEQ ID NO: 2588

SEQ ID NO: 20177 - protein, 494 aa, unidentified; identical to SEQ ID NO: 12763

SEQ ID NO: 20178 - protein, 413 aa, unidentified; identical to SEQ ID NO: 3924

SEQ ID NO: 20179 - protein, 470 aa, unidentified; identical to SEQ ID NO: 14746

SEQ ID NO: 20180 - protein, 475 aa, unidentified; identical to SEQ ID NO: 4985

SEQ ID NO: 20181 - protein, 456 aa, unidentified; identical to SEQ ID NO: 10647

SEQ ID NO: 20182 - protein, 447 aa, unidentified
EDPGRTNIGAAVLSPLGDLLFAAVIETRNKEIKKLMADRQKSRQASRRGERKARQRLAKRYGSMVKSGMVMRKLPMYAADKFVICKFIRNTQARFCNRKRCPDWITPTVQHLVQTHLNIIRKISRYLPVTDIAFEVNRFAFMHMENPEAMGVDFQNGPLKGYGDVKEAIRTQQHGKCLMCKKPISHFHHIVPRSRGGSDTIQNLAGLCTECHTKVHTDTAFRKDFDEKKSGQLKKYGALSALNQAVPFICKKLLEEYGEEHVHFCRGLDTSLIRTAFGFEKTKKNQMHEVDAYCIGLAALEVNEVETPAFDHTFQIRQFRRQDRSIIHHQTGRSYYQGKEKVAQNRKPGFEQKTTALSQWYEEQVRIHGEKEAEKLRSQLRVEKSCRHYNDMDRFLPGAVFLYEGKRYVLSGRITNGKYLRACGQGMKNFPAAECTFIRHNAGLVFI

SEQ ID NO: 20183 - protein, 420 aa, unidentified
MQYVYVLNKHGEPLMPCSPGKARLLLKQQKACVVRRTPFTIKLLFGSAGYKQPITLGVDAGSKHVGLSASTEKRELYSEEFTPRSDVVELLSTRRQNRRSRRNRKTRYRVPRFDNRVHSKHKGWLAPSVEVKIQEHITVIKHICKILPISLVRVETAEFDTQRLKAMLAGKPLPVGTDYQLGEMYDEYNVRQYVLKRDHYTCQCCGTHNTAKKVVKLHVHHLESRKTGGNAPSNLVTLCTTCHKNLHKGRVTFDGKERGKPLRDAAFMGIMRKTLMVRLKEELPIPVQGTYGYITKMRREQNDIKKSHTNDARCISKHPLAEPCSVCYRTKAIRHHNRQTHKANFSKKGIRKRSQMPYLVEGFRLWDKVLYKGQECFVSGRRSSGSFALKKLDGTSISKGVTFKKLRLLEPATNYLIERM

SEQ ID NO: 20184 - protein, 518 aa, unidentified; identical to SEQ ID NO: 3878

SEQ ID NO: 20185 - protein, 431 aa, unidentified
MPNKVYVINKHGRPLMPCSPAKARHLLDEGKAKIKKRTPFTIQLLFGSTGYTQEVILGVDAGSKTIGLSASAETEELLSAEVKPRNDVVDLLSTRREFRRARRNRKTRYRKPRFDNRVRSKHKGWLAPSVEVKIQEHITTIRRVYGILPVSKVVVETAEFDLQLLKAIEEGKPVPQGEDYQQGEMYGHYNVRQYVLWRDDYTCQCCGAHATKKKEVRLHVHHLESRKVGGDAPDNQVTLCESCHEKLHKGLIAEKDFKKRKRRSTRDATFMGIMRKTLMQRLYSELPIPVIETRGYITKATREKLLVLPKSHTNDALAIAQGKRGFNVGYLPEIAQIDKIYTIRPVRHHNRQLHKAAILKGGIRKSNQAGKYVFGYRLFDKVQFNGQDCFIFGRRTSGYFVVKTIDGKVIHNSASFKKLKLVERASNYLIA

SEQ ID NO: 20186 - protein, 343 aa, unidentified
MSEVVVRNDITDKMTQRAKYRRNRRNRKTRYRKARWLNRASSIKKDRFSPTMQSKLHSHVREIEYIQSILPVTEMVFETGQFDMQLMKNPSLANPKVRPWGYQKGANYGFENTKAMVLNRDNYTCQCCKGKHKDSKLEVHHIVFRSQGGSDEESNLLTLCHTCHKDLHSGKINPKLSGKVKGNLKYATQMNSIRKQLFRFYPNAIETFGYVTKANRLHLGVDKEHYYDACTIATQGNAFNVKSNLYKKKCVSDGDFQKTKGIRSEQPIVTDKICGFRKFDKVRYFGNDYFIKGRMSTGYAILMDIDGNKIDFSTMPRGYKTPKLSNCKRITARSTVMTQVKVV

SEQ ID NO: 20187 - protein, 421 aa, unidentified; identical to SEQ ID NO: 4361

SEQ ID NO: 20188 - protein, 368 aa, unidentified
VSDMVYVLGQDGHPLMPTCRHGKVRRMLKSGMAKVVQRCPFTIQLQYESTTHTQKINLGIDAGSKTIGVSATTESKVLYESEVVLRNDIVELLSGRRALRRSRRNRKTRYRKPRLDNRRRPDGWLAPSIRQKIKTHVTVVENVMKILPVTKIIVETASFDIQKIKNPEIEGAEYQYGEQLDFWNVREYVLFRDGHTCQCCKGKSKDNILNVHHIESRKTGGNAPNNLITLCETCHKAYHKGIITLPKEIHRGMRFRDAAFMGIMRWAFYDRLKELYTPLDVEVVNTYGYITKNTRIEHGLPKVHYVDARCISDNPASKPMDHYYFQKKVRCHNRQIHKNTILKGGIRKRNQAAYLVNGFRLFDKVKYQ

SEQ ID NO: 20189 - protein, 459 aa, unidentified; identical to SEQ ID NO: 10093
  source 1..459: note = uncultured beta proteobacterium

SEQ ID NO: 20190 - protein, 426 aa, unidentified
MVFVLDANKKPLSPCHEAVARKLLKQGKAAIFKRYPFTIILNKSVDNTDNKQEYRLKIDYGSKHTGLAILQNNNVIWLAQIDHRTDIKKKLDERRSYRRRRRNKNLRYRQPKFLNRRRKGGWIPPSLESRINNIKTWVKRLQKLVPLTHMSYENVKFDTQLMRNPEISGIEYKQGTLQGYEVKEYLLEKYNRKCCYCGKENVPLEVEHIIPKSRGGTNRIDNLCLSCHECNQKKGNLTAEEFGYPEAQRQVKETLKDTSVVNSTRWKVYDVLLRIGLPVECGTGALTKMNRIKLDLPKEHYFDACCVGQSTPDKLYFKTKDVLYIKAKGRGSRCRTNLDKYGFPRGYLTRQKYFFGFQTGDMVKAIVLKGKYKGIWYGEVSCRKTGYFDIKNKDGQRIIQGINHKYFTIVQRFDGYSYRREVAILT

SEQ ID NO: 20191 - protein, 427 aa, unidentified; identical to SEQ ID NO: 5764

SEQ ID NO: 20192 - protein, 456 aa, Halomonas sp.; identical to SEQ ID NO: 2773

SEQ ID NO: 20193 - protein, 423 aa, unidentified
MRVFVFNMRGRPLMPCSQRKARLLLRENKAMIYKYHPFTIQLTYTTGETKQDCHIGIDTGSKYIGAAVRSEDKVFWKGEIELRQDIRSNLDTKRIYRRSRRNRKTRYRKPRFLNRKRRDEWLPPSLQSRINHTFHWIDTLSSLVPNPILHIEVGKFDVAKMINPEIHGVDYQHGQTYGFFDERYFVFARDNYTCQCCGKSKNKILNTHHIIYRSNGGTNRVDNLITVCTDCHTSQNHRKGGIFYQWQEQHKKVKQYKEPPFMNTLRKRIFVAYPDAEITYGSETTPKRKAMKLDKTHYNDAIVISGINEIKENPEEWLLIKQFRKKKRSLHEATARKGRKKPNRNQTRNSKNTPYYKGFYLNDKVSVFGKSGYTGFTSNAAYIKDENNDYITLPNKTYKQVSINKMKLECHNNNWQYIIKNAV

SEQ ID NO: 20194 - protein, 408 aa, unidentified
VKRFPFVIRLVDRTVEQSEVQPVLIKLDPGSRETGAAVVRDDEKKRHHALAFFVIKHRGGAIRDALKARSAFRRRRRSQNFRCRSPRFLNRVKPKGWLPPSLRHRVETTLSFVRRMCRYLPVSGIATELVKFDSQKLQNPEVSGVKYQQGTLFEYEVREYLLEKFGRKCVYCGAEGVPLNIDHVVPRAKGGSNRVSNLVLACVSCNQKKGARSLEDFLKGKPEVLARVRRELKTPLRDAAAVNATRWVLFNELKATGLPVETGSGALTKLNRHAFGVEKEHWLDALCVGRLNGVVTRKGLNVLEIRCMGRGSRQRTRLTKYGFPRGYLMRQKCVHGFATGDMVEANVPKGKKAGLWRGRVAVRVSGSFNIQTPKGVIQGVGWKHCRLISHNDGYGYAWLGHAPHSSPA

SEQ ID NO: 20195 - protein, 441 aa, unidentified
MMVYVLDMNGQPLMPTHNGAKVRVLLKQKRAKVVSKCPFTIKLLYESTSFTQPLTLGVDTGSKYVGSAVVNDVTSEVLYESQVELRDDIKKKMDRRRVFRRSRRNKLRYRPKRFNNRKSSKRKDRYNPTLISKFQGHTREIEFIKSILPVTDVVLEVGEFDTQLLQDPTLVYHKWDYSKGELYQQENFKQAAKSRDGYGCQCCGRKNCRLEVHHLLPRSRGGSDKLANLITLCTDCHHLAHSSEEQLLAFQKKFSKKAKGTLKYATQMNVLRHMLQRKYPIAELTYGFITKEIRRIFGLEKSHMIDACCIASRGSEFHNKNSNRYKKKCVAKGDYARTDICGRKFTILPKGKIVGFRRYDKVLYNNKEYFVVGRRSIGKVYLIDIDNNRVQVERMRRGTGERYMSKAEIKVSLVRKIASSRTCVCTINKRQPLFRFSGSCR

SEQ ID NO: 20196 - protein, 426 aa, unidentified; identical to SEQ ID NO: 8077

SEQ ID NO: 20197 - protein, 420 aa, unidentified; identical to SEQ ID NO: 16965

SEQ ID NO: 20198 - protein, 403 aa, unidentified
MPCSPAKARLLLKEKKAIVVRRTPFTIQLTIATGETKQPVSLGVDAGYKHVGLSASTEKAELYASEVELRQDVSDLLSARRALRQSRRNRKTRYRAPRFDNRIRTKRKGWLAPSIENRINAHLSRIEAILRLLPVTKITVETASFDMQLLKNPDISGKEYQEGEQLGFWNVREYVLFRDGHVCQHCHGRSKDPVLNVHHLESRRTGGDSPGNLITLCETCHKALHRGEITLKAKRGQSFRAEAFMGIMSWEVLNRLKASHSELEVNNTYGYRTKHARIANGIDKSHCADAFCIAGNLGAKRLGEFFFQKQTRRNNRQIHKLSILKGGLRKRNQAPFEVKGFRLFDKVACKGEEGFIFGRRSSGSFDVRKLDGTRISAGISYKKLRLLEKRQTYLTEIRNSECA

SEQ ID NO: 20199 - protein, 425 aa, unidentified; identical to SEQ ID NO: 9663

SEQ ID NO: 20200 - protein, 411 aa, unidentified
VCLIANLLLTLAKVSYTARYVPAYRFKHITKKEVPYMVYVLDIDGQPLMPTSRHGKVRRLLNSHLAKVVKRCPFTIQLLYQSTKETQPVSLGVDAGSRHIGLSATTEREVVYQEELVPRNDIVKLLSARRALRRSRRNRKTRYRRVRFNNRVHSKHKGWLAPSVEVKIQEHITATKRICQILPIFDIHVETAEFDLQRLKAMEEGRLLPAGTDYQLGEQYDFYNTRQYVLHRDEYTCQCCGTHDNNVKLHVHHVESRQTGGEAPNNLITLCEHCHKSIHAGKMMLPKGKKRGKSYRDAAFMGIMRNTLLERLRKEVNVPVTMTYGYITKYWREKAGLEKSHINDAICISKHPYARPLETYYLTKAVRHHNRQIHKTKFSKGGIRKRNQAPYLVKGFRLFDKVLYQGESYFI

SEQ ID NO: 20201 - protein, 442 aa, unidentified
MSTSVFVLDKKPRPLMPCRPARARRLLRAGRARGVKRFPFVIRLVDRTVEQSEVQPVLIKLDPGSRETGAAVVRDDEKKRHHALAFFVIKHRGGAIRDALKARSAFRRRRRSQNFRCRSPRFLNRVKPKGWLPPSLRHRVETTLSFVRRMCRYLPVSGIATELVKFDSQKLQNPEVSGVKYQQGTLFEYEVREYLLEKFGRKCVYCGAEGVPLNIDHVVPRAKGGSNRVSNLVLACVSCNQKKGARSLEDFLKGKPEVLARVRRELKTPLRDAAAVNATRWVLFNELKATGLPVETGSGALTKLNRHAFGVEKEHWLDALCVGRLNGVVTRKGLNVLEIRCMGRGSRQRTRLTKYGFPRGYLMRQKCVHGFATGDMVEANVPKGKKAGLWRGRVAVRVSGSFNIQTPKGVIQGVGWKHCRLISHNDGYGYAWLGHAPHSSPA

SEQ ID NO: 20202 - protein, 456 aa, Halomonas sp.; identical to SEQ ID NO: 8380

SEQ ID NO: 20203 - protein, 440 aa, Lactobacillus sp.; identical to SEQ ID NO: 5150

SEQ ID NO: 20204 - protein, 440 aa, unidentified; identical to SEQ ID NO: 5150

SEQ ID NO: 20205 - protein, 430 aa, unidentified
  REGION 1..430: note = IscB polypeptide
MQSVLVLSSDKQPLDPCHPARARKLLTAGRAAVYRRAPFTIILKGRTAVESVTHAYAVKVDPGSRVTGVAVVNEQGRVVWAGEIEHRGQQVREALLARRQHRRSRRNRHCRYRPARFDNRRRKAGWLPPSLESRIANVLTWVGRLRRFLPVTSLAQELVKFDTQLMEQPEIKGVAYQQGTLYGYEVREYLLEKWGRKCTYCGATNVPLQIEHITPKSRGGSDRVSNLTLACAPCNQRKDNQTAAEFGYPELQAQARQPLKDAAAVNTTRWALYYRLQESGLPVEVGTGGRTKFNRTKLNLPKAHFIDAACVGESGARAQVDETLRPLAIRATGHGSRQMCRMDKYGFPRTGPKQARRVHGFRTGDLVRAVVPAGKKTGTHSGRVAVRSSGSFDITTTSGTVQGIGWRHCRLIHRADGYAYATGGGASSTR

SEQ ID NO: 20206 - protein, 458 aa, Sharpea sp.; identical to SEQ ID NO: 8245

SEQ ID NO: 20207 - protein, 394 aa, unidentified
VSDMVYVLGQDGHPLMPTCRHGKVKRMLKSGMAKVVKKCPFTIQLQYESTTHTQKINLGIDAGSKTIGVSATTDSKVLYESEVVLRNDIVELLSGRRALRRSRRNRKTRYRKPRLDNRRRPDGWLAPSIRQKIETHVTVVGNVMKILPVTKIIVETASFDIQKIKNPEIEGEGYQHGEQLDFWNVREYVLFRDGHTCQCCKGKSKDNILNVHHIESRKTGGNAPNNLITLCETCHKAYHKGIITLPKEIHRGMRFRDAAFMGIMRWAFYDRLKELYNPLGAEVINTYGYITKNTRIEHGLPKEHYVDARCISDNPAAKPLDHYYFQKKVRCHNRQIHKNTILKGGIRKRNQASYEVKGFRLYDQVLWKGQKCFIFGRRSTGRMDLRLLDGTHIN

SEQ ID NO: 20208 - protein, 403 aa, unidentified
LLKEKKAIVVRRTPFTIQLTIATGEAKQPVSLGVDAGYKHVGLSASTEKAELYASEVELRQDVSDLLSARRALRQSRRNRNTRYRAPRFDNRIRTKRKGWLAPTVENRINVHLSRIETVLRLLPVTKITVETASFDTQLLKNPDIAGKEYQEGEQLGFWNVREYVLFRDGHVCQHCHGRSKDPVLNVHHLESRRTGGDSPGNLITLCETCHKALHRGGITLKAKRGQSFRAEAFMGIMRWEVLNRLKASHPELEVNNTYGYWTKHARIANGIAKSHCADAFCIAGNLGAERLGEFLFQKQTRRNNRQIHKLSILKGGRRKRNQASFEVKGFRLFDKVACKGEEIFIFSRRSSGYFDVRKLDGTRISAGISYKKLRLLEKRRTYLTEIRKEAFSPLPEGRSLRA

SEQ ID NO: 20209 - protein, 480 aa, unidentified
LYTKPLDNIGEGSLPPSGEINLKGMTFMVYVKSIDGKALMPTSNAKARKLLKQKKAKVVSLRPFVVKLTYKTKTEYTQKLNLGVDSGYSNIGFSVIDAKQEYIAGEVKLLEGMKKRLLEKASYRRIRRSRLRYRKARWNNRVKSKKKGWLAPSLKHKLDTHIKFIDYLKNILPIEKITIEVANFDIQKMKDDLISGIDYQNGDMFGFWNVREFVLHRDGHKCQNPNCKHKDKKEQILKIHHIRYRSKGGSDRPENLITLCSKCHTPANHKKGKFLYDWCVNGKKVRGFKDATFMSMIRWYLVNDLKSKHNNVSITYGYITKNHRIQNGIEKSHLNDAFAIAKGTNQARTKDRFLVIQDRLKNRSLEKFYDSKIIDIRTGKKVSGGELSCGRSTRNKNLNTENLRKYRGDKISKGQRRIRKQKYFYQPNDLVKYDGKVYTVKGTQNEGKYIALKEIKKVPKEELLIPYVFKKGLNWSYGLC

SEQ ID NO: 20210 - protein, 425 aa, Acidithiobacillus sp.
MQRVLVLDKNRQPLMPCHPARARQLLRRGKAAVFRRFPFTIILKDRESGVTQPTALKLDPGSKTTGLALVADFARQGKVLVWAAELQHRGAAIRKALADRRAHRRFRRSKLRYRAPRFQNRTRPKGWLAPSLQHRVDTAMSWVHRLRRWAPVTGLSTMIHRFDTQLLQNPEISGIEYQQGELQGYEVREYLLEKWGRKCAYCDAENLPLTIDHIHPKSRGGSDRVSNLTLACVPCNQRKGNRDVTEFLAHDPKRLARIEAQRKAPLRDAAAVNSTRWALWQQLTATGLDVEVGSGGRTKHNRSQQRYPKAHWIDAACVGESGADVRLDPHHRPLTIQGTGHGERQRARLNRYGFPRGHKPRARSFLGFRTGDLVRCAKPKTKPFIGRVAIRFRPSFVVAGKKDRKHESHPKYLRILQKGDGYVYA

SEQ ID NO: 20211 - protein, 424 aa, unidentified
MASMQYVYVLNKHGEPLMPCSPGKARLLLKQQKACVVKRTPFTIKLLYGSAGYKQPVALGIDAGSKHVGLSASTEKRELYCEEFTPRNDVVDLLSTRKQNRRSRRNRKTRYRAPRFDNRVHSKHKGWLAPSVEVKIQEHITVIKRICRILPITLVRVETAEFDTQRLKAMLEGKPLPVGTDYQLGEMYDEYNVRQYVLKRDNYTCQCCGAHPTEKKPIRLHVHHIESRHVGGNAPNNLITLCVACHKALHEGKITLDKGKKRGKPLRDAAFMGIMRNTLLARLKDELNIPVKQTYGYITKLLREKNKIPKSHVNDARCIAKAPNAKPCDTMLYTRALRHHNRQIHKAKILKGGIRKKNQAPYLVKGFRLWDKVRYNGEECFITGRRSSGYFALKKYDGTVISNSASYKKLMLLEAATNYITERS

SEQ ID NO: 20212 - protein, 518 aa, unidentified; identical to SEQ ID NO: 7632

SEQ ID NO: 20213 - protein, 361 aa, unidentified
LPGCEKDVLCIGIKNKEAKFNNRTRPTGWLTPTANQLLQTHINLVKKIQKFLPISDVVLEVNKFAFMQLDNPNIQKWQYQKGPLYQKESLKSAVSEMQEHHCLFCKKKIDHYHHVVPQHKNGSNTIDNIVGLCTQHHDLVHKDATWQKRLAKKKTGLNKKYGALSVLNQIIPALTKELSSLFPKHFFVTNGKSTYDYRAAHGVRKDHWLDAYCIACSVLPNDTCDKTINSRVPYELKQFRRHDRRALNNENMSRVYTLNENVVATNRHKATKQTTDSLEEFRQRQPNDVCNLKVKEHHPTYRNMSRNYPGSVFLVGNQVHVMQGVAGSKDGKATTYKDTNANSIAAGKCKFVAKNSGILFV

SEQ ID NO: 20214 - protein, 515 aa, unidentified; identical to SEQ ID NO: 5111

SEQ ID NO: 20215 - protein, 411 aa, unidentified
MVYVQDIDGKPMMPTTRHGKVRRLLKDNKAVVVNTCPFTIKLTYKTSDYKQEIVLGVDSGTKHVGLSATTKSKELYASEVILRSDVVDLLSTRRGLRRTRRSRLRYRKQRFNNRVKSKKRGWIAPSVRHKIDSHIRIISFVYSILPVSKLIVEVAQFDTQKIKNPEISGKEYQEGEQLGFWNVREYVLARDGHKCQHCKGKSKDPILNIHHIESRKIGGDSPSNLITLCETCHKEFHKGNIKLKVSRGKSLRDAAVMGIMKWKLYEELKSRYDNVSMTFGYITKYNRINHGIEKSHVSDAFVISRNFNSERLGYYYKRKLVRRHNRQIHKMKILKGGIRKRNQAPFKVFGFKLFDKVMFQGEEHFIYARRLSGQFNIRDINGENKKDVSCKKLKYVSHGLVSVKTNLFLSQ

SEQ ID NO: 20216 - protein, 545 aa, unidentified; identical to SEQ ID NO: 6325

SEQ ID NO: 20217 - protein, 430 aa, unidentified; identical to SEQ ID NO: 4817

SEQ ID NO: 20218 - protein, 412 aa, unidentified
MLVYIINRHGEPLMPCKPRKARLLLKEDKAKVVKRTPFTIQLLHGSSGYKQPITLGVDAGSKHVGISATTENNVLFEAEVKLRNDIVKLLADRRSLRRNRRNRKTRYRKARFDNRKKPKGWLAPSVKNKIDTHIKIIDFVHRILPITKTIVEAAQFDIQKIKNPNIQGKEYQQGDQLGFWNVREYVFWRDGHHCRGRKGCKNKILQVHHIESRKTGGDAPNNLITLCGQCHKDYHAGKLKLNLKRGNSYRDATFMGIMRWAVYHRLKEKYSNIKLTYGYITKNIRIKTSLAKSHMVDARCISGNPLSKPLNSHYYFKQVRGQNRQLHKANFKKGIRKANKSPKYVYGFQLFDKVFYDNQECFIFGRRTSGYFDLRKLDGTKVHTSANYKKLKPLESASSLLCERRHGVSSHQ

SEQ ID NO: 20219 - protein, 414 aa, unidentified; identical to SEQ ID NO: 4015

SEQ ID NO: 20220 - protein, 418 aa, unidentified
MVYVLNIDGQPLMPTTRHGKVKHLLKDGKAKVVKRCPFTIKLLYETPNCTQDLTLGVDTGSGAIGTAVSTDDGEIVYMSEVVVRNDITDKMTQRAKYRRNRRSRKTRYRKARWLNRKNSIKKDRFSPTMVSKLHSHVKEIEYIKSILPITTMVFETGTFDTYLMKNPSLVNENVRHWGYQKGTNYGFENTKAMVLNRDNYTCQYCKGKHKDSKLEVHHIVFRSKHGSDEESNLITLCHTCHKALHSGKISLKLEGKVKGNLKYATQMNSIRKQLFRIYPEAIETFGYITKANRLKLGVDKEHFYDACVIATHGNKFSVRCNLYKKKCVSDGDFQQTKGVRSEQRIPTCKIQGFRKFDKVRYFGKEYFIKGRLSTGYAILMDIDGNKSDFSYMPKGFKTPKIINLKRLEARSSWIVIFK

SEQ ID NO: 20221 - protein, 431 aa, unidentified; identical to SEQ ID NO: 2746

SEQ ID NO: 20222 - protein, 349 aa, unidentified; identical to SEQ ID NO: 18101

SEQ ID NO: 20223 - protein, 514 aa, unidentified; identical to SEQ ID NO: 16920

SEQ ID NO: 20224 - protein, 420 aa, unidentified; identical to SEQ ID NO: 3089

SEQ ID NO: 20225 - protein, 417 aa, unidentified
LMPCSPAKARHLLDTGKAKVKKRTPFTIQLVYGSSGYTQEVILGVDAGSKTIGMSVSTTKEELLSAEVKPRNDVVDLLSTRREFRRVRRNRKTRYRKPRFDNRVRGKNKGWLAPSVEVKIQEHITAIKRVCHILPVSKVVVETAEFDLQLLKAIEEGKPVLQGEDYQQGEMYGHYNVRQYVLWKDNYICQCCGAHATKEKEVRLHVHHLESRKTGGDAPGNLITLCDSCHEKFHKELITEKDLMKRKRKSTRDATFMGIMRKTLMQRLYSELPIPVIETRGYITKATREKLLVLPKSHTNDALAIAQGKHGFNAGYLLGILQIDKIYTIRPVRHHNRQLHKAAILKGGIRKSNQAGKYVFGYRLFDKVQFNEQDCFIWGRRTTGIFTIKTINGKMIKDGISFKKLKLVEKSTSYLIA

SEQ ID NO: 20226 - protein, 418 aa, unidentified; identical to SEQ ID NO: 12063

SEQ ID NO: 20227 - protein, 415 aa, unidentified; identical to SEQ ID NO: 3582

SEQ ID NO: 20228 - protein, 414 aa, unidentified
MPCSPAKARLLLKEKKAIVKRRTPFTIQLTIATGEAKQPVSLGIDAGYKHVGLSASTEKAELYASEVELRQDITDLLSARRALRQSRRNRKTRYRAPRFDNRISTKRKGWLAPSVENRINAHLSRIEAVLRLLPVTKITVETASFDLQLLKNPDISGKEYQEGEQLGFWNIREYVLCRDGHVCQHCYGGSKDPVLNVHHLESRRTGGDSPDNLLTLCETCHKALHRGEITLKTKRGQSFRAETFMGIMRWEVLNRLKASHSELKVHNTYGYLTKHARIENGIAKSHGADAFCIAGNLGAERLGEFFFQKQTRRNNRQIHKLSILKGALRKRNQASFEVKGFRLFDKVACQGEEGFIFGRRSSGFFDVRKLDGTRISAGISYKKLHLLEKRQTYLMEIRKEEAFPPLPEGRGLRA

SEQ ID NO: 20229 - protein, 462 aa, unidentified
MSVLVIGRNGRALMPTNPRKARLLLKKKTASVVCRHPFTIQLLYKTGCATQKGSIGIDTGSQHIGVGITCGDRVILKDEHALRSSMEKRSLLATRAVMRRGRRYRKVRYRKPKWRHHTKRMYFEKANRRGQHWRKVKTTTQSPRPKGWLPPSLQSKCDHHFCIIDRYLKYLPDPITRNLVIETGRFDMARMNDPTIHGEMYKRGPMYDAENLRAYIFARDNYQCACCKAKAGTTRKADGTTVKLVAHHILFRSRGATDNPKYMVSVCDHCHTTKAHQPGGILYSWMENNKKVTRGLRDATFMNILRKRLFARYPQAAFTYGNITAADRKQYHLPKSHVNDAVAVSLFGKEVPTVRDTCQTTYYKQVRKSKRSLHEAIPRKGRKRPNTKAVRNKKNTTQVNGFKLWDSVLADGKKLFICSFTGTSAYLIDKNGCYISQPGKTYKQWPLSKLKRLHPNGNWLMA

SEQ ID NO: 20230 - protein, 515 aa, unidentified; identical to SEQ ID NO: 5111

SEQ ID NO: 20231 - protein, 415 aa, Bacillus sp.; identical to SEQ ID NO: 2671

SEQ ID NO: 20232 - protein, 515 aa, unidentified; identical to SEQ ID NO: 2896

SEQ ID NO: 20233 - protein, 417 aa, unidentified
MPCSPAKARLLLKEKKAIVKRRTPFTIQLTIATGEARQPVTLGVDSGYKHIGLSATTEKDELYASQVELRQDITDLLSARLALRRSRRSRKTRYRAPRFDNRVASKREGWLAPSVENRIAAHMSRVEAVMRVLPVTAITVETAAFDTQLLKNPDIAEAAYQQGEQLGFWNVREYVLFRDGHVCQHCRGKSKDPILNVHHIESRRTGGDAPNNLITLCETCHKAFHRGEIELKVRRGKSFKAETFMGIMRWTLFERLKKAHPELRVRNTYGYLTKHKRISHGIAKSHCADAYCIADNLGAKRLEGFFFQKQTRKHNRQIHKLSILKGGLRKKNQAPYEVKGFRLFDKVICKGEEAFIFGRRTSGSFDVRRLDGTRISAGINYKKLRLLEPRTTYLTEFRKEAALPHLHECRGFRAEFL

SEQ ID NO: 20234 - protein, 450 aa, unidentified; identical to SEQ ID NO: 2935

SEQ ID NO: 20235 - protein, 427 aa, Mastigocladus sp.; identical to SEQ ID NO: 3596

SEQ ID NO: 20236 - protein, 410 aa, Bacillus sp.; identical to SEQ ID NO: 16732

SEQ ID NO: 20237 - protein, 512 aa, unidentified; identical to SEQ ID NO: 3720

SEQ ID NO: 20238 - protein, 418 aa, Moorena sp.; identical to SEQ ID NO: 7959

SEQ ID NO: 20239 - protein, 537 aa, unidentified; identical to SEQ ID NO: 9239

SEQ ID NO: 20240 - protein, 376 aa, unidentified; identical to SEQ ID NO: 16909

SEQ ID NO: 20241 - protein, 415 aa, unidentified; identical to SEQ ID NO: 10543

SEQ ID NO: 20242 - protein, 413 aa, unidentified
LKVFVLNMRGKPLMPCSPAKARHMLKAGKAVVVRRTPFTIKLTIATGETKQDVTLGVDAGARHVGISATTEKEEVFASEVALRQDITGLLADRLAFRRARRNRKTRYRAPRFNNRVRSKHKGWLAPSVENRIQAHISRIEAVCRLLPVTKIVIETASFDIQKIRNPEVEGTGYQQGDQLGFWNVREYVLFRDGHICQHCRGRSKDPILNVHHLESRKTGGDAPNNLITLCETCHKAYHAGKIKLKVKRGQSFRAEAFMGIMRWTLLDRVRKTHPELPVENTYGYLTKHKRIALGLPKTHCADAFCIAGNLKALRRGDFLFQQQTRKHNRQIHRCSILKGGVRKLNQAPFLVKGFRLFDKVRIGGQIGFVFGRRVRGIFNIRRLDKTVIGTDINCKKLSLLETRKTFLTELRKE

SEQ ID NO: 20243 - protein, 415 aa, Bacillus sp.; identical to SEQ ID NO: 7196

SEQ ID NO: 20244 - protein, 406 aa, unidentified; identical to SEQ ID NO: 4082

SEQ ID NO: 20245 - protein, 448 aa, unidentified
MSTGLRAVQAEPAGIRKGDALKVFVLNMRGRPLMPCSPARARHLLKAGKAVVRRRTPFTIQLRIATGETKQSVTLGVDAGAKHVGLSAATEKEEVFASEVELRQDITGLLAARLSLRRDRRHRKTRYRAPRFLNRVRSKHKGWLAPSVENRIQAHMSRIDAVCRLLPVTRIVIETASFDVQKIRNLEVEGTGYQQGDQLGFWNVREYVLFRDGHVCQHCHGYSKDKILNVHHLESRQTGGDAPNNLITLCETCHKACHAGKIKLKVKRAQSFRAEAFMGIMRWTLLDRMRKAHSGLPVENTYGYLTKNTRITLGLPKTHCVDAYCIAGNLKAVRRGVCLHQRQVRKHNRQIHKCTVLSKTLKDGTKIGYRKLNQTPHLVKSFRLFDKVRCLGQTGFIFGRRSSGYFDVRRLDGVKLSSGISYRKLTLLEKRSTYLTELRKEDGASSPV

SEQ ID NO: 20246 - protein, 429 aa, Ktedonobacter sp.
LSNVFVIDSYYKPLNPVHSAHARLLLTRGKAAVFRRYPFTIILHRVVEQPEVQPLRLKLDPGSKTTGIALVNDANGKVVFAAELSHRGHAIKESLERRRAVRRSRRQRKTRYRKPRFQNRRRKEGWLPPSSESRLSNILTWVARLRRYAPITAISQELVKFDMQLMENPDITGVEYQQGTLQGYEVREFLLFKWERTCAYCGKQDVPLQIEHIHPRANGGTNRISNLCLACEPCNTAKGTQDIAVFLAKKPEVLKRILAQAKKPLKDASAVNATRWALLERLKTFGLPVECGSGGLTKYNRTTRGLAKTHWLDAACVGKSTPDVIVQKRLVPLFITATGHGRRQMCTPDERGFPKQHKKRKRTFLGYRTGDVVKAITPKGTFEGKIAIRHRPSFRLGKVDIHPKYMRCVHQADGYEYRQKGVRQAPPHV

SEQ ID NO: 20247 - protein, 454 aa, unidentified; identical to SEQ ID NO: 8101
  source 1..454: note = uncultured beta proteobacterium

SEQ ID NO: 20248 - protein, 426 aa, Anoxybacillus sp.
MVFVLDTNKRPLAPCHEAVARKLLKQGKAAIYRRFPFTIILKKSVDESEIKATYRLKIDYGSRHTGLAILRGQEVVWLGQLDHRTDIKERIDKRRAFRRARRNRKTRYRKPRFLNRKRKEGWLPPSLESRVQNIQTWVSRLKKLCPIGHISYENAKFDTQLMRNPEINGVEYQQGTLQGYEVREYLLEKFGRKCCYCGKENVPLEVEHIIPKSRGGTDRVDNLCLACHDCNQRKGSKTAEEFGYPHIQKQVKEPLKDASAINSTRWKAYEVLKQTGLDVECGTGARTKMNRIRLDLPKTHYFDACCVGESTPNHLYFKTKEVLFIKAKGRGSRSRTNLDRYGFPRGYLARQKFFFGFQTGDMVKAVVPRGKYQGVWFGEVACRKTGSFDIKGKDGKRIAQGINYRYVQVIQRFDGYAYGKGVAELA

SEQ ID NO: 20249 - protein, 428 aa, unidentified; identical to SEQ ID NO: 7377

SEQ ID NO: 20250 - protein, 415 aa, unidentified; identical to SEQ ID NO: 6883

SEQ ID NO: 20251 - protein, 423 aa, unidentified
MVYVLNIDGQPLMPTDRHGKVRHLLKDGRAEVVKRCPFTIRLLYDSTHYTQDIVLGVDAGSKHIGLSGTTETKELYASDVELRNDIVDLISTRRQNRRFRRNRKTRYRKARFLNRLSDKKDWLAPSIRQKVDTHMTVVSRVCMILPVTKIIVETASFDIQKIKDPDISGTGYQQGEQLDFWNVREYVLFRDGHTCQCCKGKSKDPVLNVHHIESRKTGGDAPNNLITLCETCHKSYHSGAVQLPKAIHRGMRFKDAAFMGVMRWNFYNKLKEIYELQGIEIRMTFGYLTKNTRIRHHLPKEHYIDARCISGHPEAIPNNEVFYQKKVRCHNRQIHKNTILKGGIRKRNQTGYLVKGFRLFDKVAYKGREYFIFGRRQSGFFDLRNLSGCKVNKGSLSYRKIGFLEPRQYYLCERRVMDTQGYA

SEQ ID NO: 20252 - protein, 414 aa, unidentified
MPCSPAKARLLLKEKKAIVKRRTPFTIQLTIATGETKQPVSLGVDAGYKHVGLSASTEKAELYASEVELRQDITDLLSARRALRQSRRNRKTRYRAPRFDNRISTKRKGWLAPSVENRINAHLSRIEAVLRLLPVTKITVETASFDLQLLKNPDISGKEYQEGEQLGFWNIREYVLCRDGHVCQHCYGRSKDPVLNVHHLESRGTGGDSPGNLITLCETCHKALHRGEITLKAKRGQSFRAEAFMGIMRWEVHNRLRALHPGIEVSNTYGYRTKHARIANGIAKSHCADAFCIAGNLGAERLCEFFFQKQTRRNNRQIHKLSILKGGIRKRNQAPFEVKGFRLFDKVACQGEEGFIFGRRSSGFFDVRKLDGTRISAGISCKKLHLLEKRRTYLTEIRKEEALPPLPEGRGLRA

SEQ ID NO: 20253 - protein, 400 aa, unidentified
MPTCRNGKVRHLLRDKKAAIVNLHPFTIQLSQERSNVVQPITLGVDTGYENVGLSATTEKKVLFECNVKLRSDISNNIATRKQLRRSRRSRKARYRESRFMNRRRCIGWLPPSVQSRVDAQKFLIAKVHKILPIATIVVEVAKFDIHKLKNPMIEGSDYQHGEQMGFWNVREYVLCRDGHKSRKCKGKSNDYILNVHHIESRRTGGNAPDNLITLCETCHKNYHKGLISLEGIKRGNSYKSESFMCIMKNFLVNSLTQTYNNVLTTFGYITKNARINNHLKKDHNIDARCISGNPNAEPPKEIYLIKKVRCHNRKIHKCKFLKGGKRLLNQSPYLMHGFRLFDKVLFDSKTAFVYGRRLNGSFLIKNIHGNTISSSISYKKLKLLKRRSGWIMDYDVCLG

SEQ ID NO: 20254 - protein, 414 aa, unidentified
MPCSPAKARLLLKEKKAIVVRRTPFTIQLTIATGESKQPVSLGVDAGYKHVGLSASTEKAELYASEVELRQDITDLLSARRALRQSRRNRKTRYRAPRFDNRIRTKRKGWLAPSVENRINAHLSRIGAILRLLPVTKITVETASFDTQLLKNPDISGKEYQEGEQLGFWNVREYVLFRDGHACQHCHGRSKDPVLNVHHLESRRTGGDSPGNLLTLCETCHKALHRREIKLKTKRGQSFRAEAFMGIMRWEVLNRLKASHPELEVHNTYGYRTKHTRIVNGIDKSHCADAFCIAGNLGAKRLGEFFFQKQTRRNNRQIHKLSILKHGLRKRNQAPFEVKGFRLFDKVVCQGEEGFIFGRRSSGSFDVRKLDGTRISAGISYKKLRLLEKRRTYLKEIRKEEALPPLPEGRSLRA

SEQ ID NO: 20255 - protein, 415 aa, unidentified; identical to SEQ ID NO: 13500

SEQ ID NO: 20256 - protein, 431 aa, unidentified
MDAWDIIVVLNKRGKPLMPCSPAKARLLLKEKKAIVKRRTPFTIQLTIATGESKQPVSLGVDAGYKHVGLSASTEKAELYASEVELRQDITDLLSARRALRQSRRNRKTRYRAPRFDNRIRTKRKGWLAPSVENRINAHLSRIEAVLRLLPVTKISVETASFDMQLLKNPDIAGKEYPEGEQLGFWNVREYVLFRDRHVCQHCYGRSKDPVLNVHHLESRRTGGDSPGNLITLCETCHKALHRGDITLKAKRGKSFRAEAFMGIMRWEVHNRLRALHPGIEVSNTYGYRTKHARIANGIAKSHCADAFCIAGNLGAERLCEFFFQKQTRRNNRQIHKLSILKGALRKRNQAPFEVKGFRLFDKVACQGEEGFIFGRRSSGFFDVRKLDGTRISAGISYKKLHLLEKRQTYLIEIRKEEAFPPLPEGRGLRA

SEQ ID NO: 20257 - protein, 417 aa, unidentified
MPCSPAKARLLLKERKAIVKRRTPFTIQLTIATGEAKQPVALGVDSGYKHIGLSATTEKAELYASEVELRQDITDLLSARLALRRSRRSRKTRYRAPRFDNRVASKREGWLAPSVENRIVPHMSRVEAVMRVLPVTAITVETAAFDTQLLKNPDITGAAYQQGEQLGFWNVREYVLFRDGHVCQHCSGKSKDPILNVHHIESRRTGGDAPNNLITLCETCHKAFHRGEIKLKVKRGKSFKAETFMGIMRWTLFERLKKAHPELSVRHTHGYLTKHKRISHGIAKSHCADAYCIAGNLGAMRLNSYLFQKQTRKHNRQIHKLSILKGGLRKKNQAPYEVKGFRLFDKVICKDEEAFIFGRRSSGSFDVRRLDGTRISAGISYKKLRLLEPRTTYLTEFRKEAALPPLHKCRGFRAEFL

SEQ ID NO: 20258 - protein, 469 aa, Desulfobacter sp.; identical to SEQ ID NO: 2403

SEQ ID NO: 20259 - protein, 454 aa, unidentified; identical to SEQ ID NO: 12703

SEQ ID NO: 20260 - protein, 471 aa, unidentified
RQVPFTIQLTYKNQPVLQPVTIAEDPGRSNIGMAVVSLSGELLSAAVVQTRNKEIVKLMEKRKQHRRASRNGERKARQRLAKKCHTMIKTGFLMRKLPMYGKDKRVRCNVIKNTEAKFCNRKREDGWLTPSAEHLVRTHINLIHKMQKFLPISDVAIEINRFAFLSLEDPSISGVDFQNGPLKGYDDLNAAVEDLQDGHCLMCNSPIEHRHHIVPRSMQGSNTIGNIAGLCCKCHERVHKDSAFEDSLKKKKAGLNKRYAAVSALNQAIPFICKRLEQEFGKEHVHYCSGRDSSMVRRSLGYHKTKEEQLHEVDAWCIAVLSLQHVPEKAPEFDHVHEILQFRRQDRSRIKAQTSRAYYHERKKIAKNRKKAEGQREDSLQEWRKRQVERYGEEQTRKMISQLKVKKSIRRYNRLDRLMPGAVFYYQGVRYVMRGQHCEGTYLQAVGMGSKDFPAKKCKIVAQNEGLVFVS

SEQ ID NO: 20261 - protein, 417 aa, Sutterella sp.
MPCSPAKARLLLKEKKAIVKRRTPFTIQLTIATGEAKQPVALGVDSGYKHIGLSATTEKAELYASEVELRQDITDLLSARLALRCSRRSRKTRYRAPRFDNRVASKREGWLAPSVENRIAAHMSRVEAVMRVLPVTAITVETAAFDTQLLKNPDIAEAAYQQGEQLGFWNVREYVLFRDGHVCQHCRGKSKDPILNVHHIESRRTGGDAPNNLITLCETCHKAFHRGEIELKVRRGKSFKAETFMGIMRWTLFERLKKAHPELSVRNTYGYLTKHKRISHGIAKSHCADAYCIADNLGAKRLEGFFFQKQTRKHNRQIHKLSILKGGLRKKNQAPYEVKGFRLFDKVICKGEEAFIFGRRTSGSFDVRRLDGTRISAGISCKKLRLLEPRTTYLTEFRKEAALPPLHECSGSRAEFR

SEQ ID NO: 20262 - protein, 412 aa, unidentified; identical to SEQ ID NO: 13242

SEQ ID NO: 20263 - protein, 474 aa, unidentified
  source 1..474: note = Anaerolineae bacterium
MGEVDHSSKEEAGFLLACKPKEFFVGKVFVLNKDGKPLMPTTERKARLLRQSGQARRVSCNPYQIQLLYGSSGYVQPVDAGIDAGYGEVGFSAVSPTEELLGGELTLLTGMVERRKERAMYRRTRRSRRRHRQPRGNRQHQPEGWLAPSIQHKLDSHIRLVETKLRGLLPIRKLTIEVANFDIQALKTPGISGSQYQQGEQASFWNVREYILHRDDHECQNPACQHLGQAKALQVHHLGYWKGDRSDRPANLITLCVFCHVPANHQPDGFLYGWQPQLKSFKPETFMTTVRWRLSQTLEADATYGYLTKCRRIALGLPKSHPNDAFVIAGGTTQTRAKTLYLEQIRRNNRSLQKFYDAQYLDSRTGQKASGQKLFSGRRTRNQNLNGENLHPYRGQKLSKGRVSIRRQRYAYQPGDLVRFEGQKYRVKGIQNYGAYIKLDGLPKPVKTALVSPLRWRKGMCQKWNTNGTIEPSI

SEQ ID NO: 20264 - protein, 425 aa, Parasutterella sp.
  VARIANT 425: note = X can be any naturally occurring amino acid
LRVFVLNKRGKPLMPCSPAKARHLLKEKKAIVVRRTPFTIQLTIATGESKQPVSLGVDAGYKYVGLSASTEKAELYASEVELRQGITDLLSARRALRRARRNRKTRYRAPRFDNRIRTKRKGWLAPSVENRINAHLSRIETVLRMLPVTKITVETASFDMQLLKDPDISGKEYQEGEQLGFWNVREYVLFRDGHVCQHCHGRLKDPVLNVHHLKSRRTGGDSPGNLITLCETCHKALHRGEITLKAKRGQSFRAETFMGIMRREVLDRLKASHPKLEVQNTYGYRTKHARISNGIAKSHCADAFCIAGNLGAKRLGEFLFQKQTRRNNRQIHKLSILKGSLRKRNQAPFEVKGFRLFDKVAYQGEEGFIFGRRSSGFFDIRRLDGTRISAGINYKKLRLLEKRRTYLTEIRKEEARRPLPEGRGX

SEQ ID NO: 20265 - protein, 434 aa, unidentified; identical to SEQ ID NO: 8083

SEQ ID NO: 20266 - protein, 355 aa, unidentified
SKHIGISATTKTKVLYESDVELRDDIVKLLATRRQLRRSRRSRKTRYRPVRFDNRKRKEGWLAPSIRQKIGSHLTVVANACKILPINQIIVETASFDIQKIKDPEIQGIEYQQGEQMDFWNIREYVLFRDGHICQCCKGRFKDKILNVHHIESRKTGGNAPNNLITLCETCHKGYHNGTVILPKNIKHGMQFKDAAFMGIMRWTFYNTLKEQYEPDIPVSMTYGYLTKNTRIEHGLPKEHYIDARCISGNPDAVSDGTYYYQKKVRCHNRQIHKQTILKGGIRKSNQAEYLVKGYRLFDKVRYQGREYFIFGRRKSGFFDIRTLSGEKVNKGSISVKKLTFADTRKNYLIERRTV

SEQ ID NO: 20267 - protein, 417 aa, unidentified; identical to SEQ ID NO: 2708

SEQ ID NO: 20268 - protein, 452 aa, unidentified; identical to SEQ ID NO: 3322

SEQ ID NO: 20269 - protein, 377 aa, unidentified
LRVFVLNKRGKPLMPCSPAKARLLLKEKKAIVKRRTPFTIQLTIATGEAKQPVSLGIDAGYKHVGLSASTEKAELYASEVELRQDITDLLSARRALRQSRRNRKTRYRAPRFDNRIRTKRKGWLAPSVENRINAHLSRIEAVLRLLPVTKITVETASFDLQLLKNPDISGKEYQEGEQLGFWNIREYVLCRDGHVCQHCYGRSKDPVLNVHHLESRRTGGDSPGNLITLCETCHKALHRGEITLKAKRGQSFRAEAFMGIMRWEVLGRLKASHPELEVNNTYGYRTKHARIANDIAKSHCADAFCIAGNLGAERLGEFFFQKQTRRNNRQIHKLSILKGGIRKRNQAPFEVKGFRLFDKVACQGEEGFIFGRRSSGF

SEQ ID NO: 20270 - protein, 423 aa, unidentified; identical to SEQ ID NO: 3951

SEQ ID NO: 20271 - protein, 465 aa, unidentified
MNTCVCVLSNSGERLMPTFRLGKVRRLLKDGKAKIIKHHPFTIQLLYDSKTNTQPIEICEDVGYNYIGISVKSQSHEYVSAQYDTLQDEKACHDSCRKLRRTRRNRLRYRKPRFDNRKRGEGWLAPSLKHKKELNVNIVKMYCTVMPITHATVEVGSFDTMLVKAIQEGKAVPEGADYQKGPRYNLATLREAVFYRDNYVCKICGRKATEGAILHMHHMFYWKGRHGNSLNELLTVCEKCHTPANHQKSGKLYGFGEKIKFADLSGAAFMNTVRWQIVNELYVAFGKPFVTITYGAMTKEKRIALQLEKSHNNDAYAMGEFHPNLRCMFEHYEKARRNNRILEKFYDSRYIDIRTGEIATGKELFNGRINRNHKKDSENLHKYRGKRTYAGHRALLRKKVNLNPGDLVSLNGENLIVHSTHTKKNGAVNVEFETPAKSGQKSASLKKLKIVKAANSIHPAWKKIS

SEQ ID NO: 20272 - protein, 414 aa, unidentified; identical to SEQ ID NO: 4252

SEQ ID NO: 20273 - protein, 470 aa, unidentified
MSVFVVGLNGCRLMPTSERKARLLLKQGKAFVEQKVPFTIRLNYKTGSTTQLGYLGIDTGSQHIGVSVVREDGTVLHKEEIGLRDSMSKRKLLEAKASLRRGRRYRKTRYRHPKWRPKTKRVYCEVPDRKGRHWQKKKITFTSKRPKGWLPPSLQSKTDHHIRWIKKLQDLLPEGYRLSIELGRFDPARMKNPEIHGDLYQKGPQYDYENVRAYVLDRDRYTCQICKKKGGKLHVHHILYRSHGATDDPQYMVIVCSDCHSAQNHLPGGILYQWMQEQKRFSRGLRDATFMNILRKRLIRAFPEAVFTYGNVTKVDREKLKLPKSHGNDATAIALVKTGITAVKDKESVICIQQVRRKKRSLHEETPRKGRKEPNRTAARNNKNTKAVTVTKRQNKKKVSMTGCLFDRVELNGKKGWISGFTGKSCYVKDADDQYLSTSPKYKQVSLSKLRILHHCGNWIIGAKKTLGKG

SEQ ID NO: 20274 - protein, 396 aa, unidentified; identical to SEQ ID NO: 4508

SEQ ID NO: 20275 - protein, 445 aa, Myxosarcina sp.; identical to SEQ ID NO: 19933

SEQ ID NO: 20276 - protein, 420 aa, unidentified; identical to SEQ ID NO: 3247

SEQ ID NO: 20277 - protein, 456 aa, unidentified; identical to SEQ ID NO: 11534

SEQ ID NO: 20278 - protein, 411 aa, unidentified; identical to SEQ ID NO: 6901

SEQ ID NO: 20279 - protein, 493 aa, unidentified; identical to SEQ ID NO: 10490

SEQ ID NO: 20280 - protein, 472 aa, unidentified
VVGNRLLSIKPLINIGEGVIYSSICTGLSLQTYQKRKEVPCMVYVLDIDGQPLMPTTRHGKVRRLLNGHLAKVVKRCPFTIQLLYQSTKETQPVSLGVDAGSKHIGMAATTEKKVVYQEELSPRNDVVKLLSARRTLRRTRRNRKTRYRKPRFNNRAHSKHKGWLAPSVEVKIQEHITAIKRICQILPISEIHVETAEFDLQRLKAMDEGSPLPVGIDYQLGEQYDFYNTRQYVLHRDGYTCQCCGTHDNNIKLHVHHIESRQTGGDAPNNLIILCEHCHKALHEGKLELPKGKKRGKSYRDATFMGVMRKTLLERLKKEIDVPVEGTYGYITKYWRERAGLEKSHIHDAVCISKYPYAKPLDTYYLTKAVRNHNRQIHKSNFSKGGIRKRNQAPYLVKGFRLFDKVLYQGKEYFIFGRRATWYFDIRTLDGTKVNKGSISYKKLRIQDTAKAYLKEARAIPHMNKFTCVLA

SEQ ID NO: 20281 - protein, 426 aa, Anoxybacillus sp.
MVFVLDTNKRPLAPCHEAVARKLLKQGKAAIYRRFPFTIILKKSVDESEIKATYRLKIDYGSRHTGLAILRGQEVVWLGQLDHRTDIKERIDKRRAFRRARRNRKTRYRKPRFLNRKRKEGWLPSSLESRVQNIQTWVNRLKKLCPIENISYENAKFDTQLMRNPEINGVEYQQGTLQGYEVREYLLEKFGRKCCYCGKENVPLEVEHIIPKSRGGTDRVDNLCLACHDCNQRKGSKTAEEFGYPHIQKQVKESLKDASAINSTRWKVYEVLKQTGLDVECGTGARTKMNRIRLDLPKTHYFDACCVGESTPNHLYFKTKEVLFIRAKGRGSRSRTNLDRYGFPRGYLARQKFFFGFQTGDMVKAVVPRGKYQGVWFGEVACRKTGSFDIKGKDGKRIAQGINYRYVQVIQRFDGYAYGKGVAELA

SEQ ID NO: 20282 - protein, 412 aa, unidentified
  REGION 1..412: note = IscB polypeptide
MPTNRLGKVRHLLKDGLAKVVQRTPFTIQLLYDSDEYTQPITLGVDAGSKTIGLSATLVPPSNGRTETDKKEVFSAEVQLRTDIVDLLSTRKQNRGTRRSHKTRYRKARFQNRKKDKDWLAPSIRHKIDTHLTMVDKIHKILPIIKIIVEVAQFDIQKIKNPDISGVEYQQGVQLDFFNAREYVLYRDDHKCQLCNGKSKDKILNVHHIESRKTGGDAPNNLVTLCETCHKKHHEGYLKLKVKRGQLFKDASFMGIMRWAFYNTLKEKYPNVLMTYGYITKNTRITNKLSKDHRTDALCITGNPTVVGLDTWYYCKKVRCQNRQIHKNTINKGGARKLNQSPFVVFDIRLFDKVKYNDQECFVFGRRVSGSFDIRLLDGTTVNAGVGYKKVKVLEQRKTILIERRKAIPPHA

SEQ ID NO: 20283 - protein, 426 aa, unidentified; identical to SEQ ID NO: 15348

SEQ ID NO: 20284 - protein, 512 aa, unidentified; identical to SEQ ID NO: 8121

SEQ ID NO: 20285 - protein, 431 aa, unidentified
MDAWDIIVILNKRGKPLMPCSPAKARLLLKEKKAIVARRTPFTIQLTIATGEAKQPVSLGVDAGYKHVGLSASTEKAELYASEVELRQDVSDLLSARRALRQSRRNRNTRYRAPRFDNRIRTKRKGWLAPTVENRINVHLSRIETVLRLLPVTKITVETASFDTQLLKNPDIAGKEYQEGEQLGFWNVREYVLFRDGHVCQHCHGRSKDPVLNVHHLESRRTGGDSPGNLITLCETCHKALHRGEIKLKAKRGRSFRAETFMGIMRWGVLNRLKASHPKLEVHNTYGYRTKHARISNGIAKSHCADAFCIAGNLGAERLGEFFFQKQTRRNNRQIHKLSILKGGIRKRNQAPFEVKGFRLFDKVACQGEEGFIFGRRSSGFFDVRKLDGTRISAGISCKKLHLLEKRRTYLTEIRKEEALPPLPEGRGLRA

SEQ ID NO: 20286 - protein, 427 aa, Alicyclobacillus sp.; identical to SEQ ID NO: 2399

SEQ ID NO: 20287 - protein, 416 aa, unidentified; identical to SEQ ID NO: 18097

SEQ ID NO: 20288 - protein, 431 aa, unidentified; identical to SEQ ID NO: 17669

SEQ ID NO: 20289 - protein, 428 aa, unidentified
LKVFVLNMRGQPLMPCSPAKARHLLKAGKAVVKRRTPFTIQLRIATGETKQNVTLGVDAGAKHVGLSATTEKEEVFASEVELRQDITGLLAARLSLRRDRRHRKTRYRAPRFLNRVRSKHKGWLAPSVENRIQAHMSRIDAVCRLLPVTKIVIETASFDIQKIKDPSVEGTDYQQGDQLGFWNVREYVLFRDGHVCQHCHGHAKDKILNVHHLESRQTGGDAPNNLITLCETCHKACHAGKIKLKVKRAQSFRAEAFMGIMRWTLLDRMRKAHSGLPVENTYGYLTKNTRITPGLPKTHCVDAYCIAGNLKAVRRGVCLHQRQVRKHNRQIHKCTVLSKTLKDGTKIGYRKLNQTPHLVKNFRLFDKVRCLGQTGFIFGRRSSGYFDVRRLDGVKLSSGISYRKLTLLEKRSTYLTELRKEDGASSPV

SEQ ID NO: 20290 - protein, 402 aa, unidentified; identical to SEQ ID NO: 9694

SEQ ID NO: 20291 - protein, 414 aa, unidentified; identical to SEQ ID NO: 6490

SEQ ID NO: 20292 - protein, 434 aa, unidentified; identical to SEQ ID NO: 7534

SEQ ID NO: 20293 - protein, 443 aa, Anoxybacillus sp.
MVEENMTCFMQRKGENPMVFVLDTNKRPLAPCHEAVARKLLKQGKAAIYRRFPFTIILKKSVDESEIKATYRLKIDHGSKHTGLAILRGQEVVWLGQLDHRTDIKERIDKRRAFRRARRNRKTRYRKPRFLNRRRKDGWLPPSLESRVQNIQTWVNRLKKLCPIGYISYENAKFDTQLMRNPEISGIEYQQGTLQGYEVREYLLEKFGRKCCYCGKENVPLEVEHIIPKSRGGTDRVDNLCLACHDCNQRKGSKTAEEFGYPHIQKQVKETLKDTSAINSTRWKAYEVLKQTGLDVECGTGARTKMNRIRLDLPKTHYFDACCVGESTTNHLYFKTKEVLFIKAKGRGSRSRTNLDRYGFPRGYLARQKFFFGFQTGDMVKAVVPRGKYQGVWFGEVACRKTGSFDIKGKDGKRIAQGINYRYVQVIQRFDGYAYGKGVAELA

SEQ ID NO: 20294 - protein, 418 aa, unidentified; identical to SEQ ID NO: 15678

SEQ ID NO: 20295 - protein, 408 aa, unidentified; identical to SEQ ID NO: 5302

SEQ ID NO: 20296 - protein, 427 aa, Parasutterella sp.; identical to SEQ ID NO: 7064

SEQ ID NO: 20297 - protein, 444 aa, unidentified
MIPTSNIVEANFTLEIGEAEMSNYTLVIDANNQPLSPCHPSVARKLLASKKAAVYRRYPFTIILNKTVENPQIEPIELKLDPGSKTTGVALVQGNKVLWGAELTHRGQAIKMSLESRRSFRRSRRNRHTRYRQARFLNRTRQSSLLAPSLQHRVETTLTWVNKLLRLAPISSIVQELVRFDLQQLENPEISGVEYHEGELAEYEVREYLLNKWDRKCAYCGIENVPLQIDHIHSKAKGGSNRISNLCLACEQCNIKKGTQSIEQFLAKKSDILKRIFSQAKRPLKDAATVNSTRWELFNRLQETGLPVATGSGGLTKFNRTRLNLPKAHWLDAACVGLVESLKVLTSKPLLIKATGHGTRQMCRPDKFGFPSRYVPRLKFVNGFQTGDIVKAIVTSGKKIGIYVGRVTVRSSGSFNIYTSELVSGISYKYCSVIHRKDGYSYAT

SEQ ID NO: 20298 - protein, 417 aa, unidentified
MPCSPAKARLLLKEKKAIVKRRTPFTIQLTIATGEARQPVALGVDSGYKHIGLSATTEKAELYASQVELRQDITDLLSARLALRRSRRSRKTRYRAPRFNNRVASKRKGWLAPSVENRIAAHMSRVEAVMRVLPVTAITVETAAFDTQLLKNPDIAGEAYQQGEQLGFWNVREYVLFRDGHVCQHCRGKSKDPILNVHHIESRRTGGDAPNNLITLCETCHKAFHRGEIKLKVKRGKSFKAETFMGIMRWTLFERLKKAHPELRVRNTYGYLTKHKRISHGIAKSHCADAYCIADNLGAKRLEGFFFQKQTRKHNRQIHKLSILKGGLRKKNQAPYEVKGFRLFDKVICKGEEAFIFGRRTSGSFDVRRLDGTRISAGISCKKLRLLEPRTTYLTEFRKEAALPPLHECRGFRAEFL

SEQ ID NO: 20299 - protein, 544 aa, unidentified
MKQKKQKVIVYILNKKGKPLMPTTRCGHVRKLLDSKKAVVVNSNPFTIRLKYDTPNGIQDVFAGIDSGRENIGSGASNEDGDCLYLGELKTSNKSIKIKMAERTGFRRERRRHDRQSKQRKAKKDHTEIQNGNDDICRTTISCKSVQISYPVAEESVTHKIIRGKEGKFANRHRDEGWITPSARQLVQMHMNDLKSMCKILPISHVTLERVAFDFQKLENENIKVWEYGKGKLYGYDSPEEYIHDVQDGKCLVCGKPHIDYLHHIIPRSKGGSDKVSNIAGLCYDCHYGPMGVHNCQDTQNRLPELKNEANKQYKVSLLNSVMTVLIEEMDKFCKANSIIFSICEGHDTAKVRDMYDLQKDHCIDGFAISLVDRNVKSVDVMPDRIYQKQRYKKKSKNIIQKRNCREYYDDKKLVAVNRHKGTDQKADSLEEYMNTYAETHTTDECKKHFDSLVVKPARRTYTFHKEWRICPFHIGDKVRYEKKNKIKGNTKVDTFICEGIYFSKDENKAEVEHNKTKSKKMKFCRTIESGCIPYIDYRKLALI

SEQ ID NO: 20300 - protein, 470 aa, unidentified; identical to SEQ ID NO: 2825

SEQ ID NO: 20301 - protein, 415 aa, unidentified; identical to SEQ ID NO: 7777

SEQ ID NO: 20302 - protein, 431 aa, unidentified
MPNKVYVINKHGRPLMPCSPAKARHLLDAGKAKVKKRTPFTIQLVYGSSGYTQEVILGVDAGSKTIGMSASTTKEELLSAEVKPRNDVVDLLSTRREFRRARRNRKTRYRKPRFDNRVRSKHKGWLAPSVEVKIQEHITSIKRVCRILPVSKVVVETAEFDLQLLKAIADGKPVPQGEDYQKGEMYGHYNVRQYVLWRDDYTCQCCGAHATKKKEVRLHVHHLESRKTGGDAPGNLVTLCDSCHEKLHKGLIAEKDFKKRKRRSTRDATFMGIMRKTLMQRLCSELPIPVIETRGYITKATREKLLVLPKSHTNDALAIAQGKQGFNVGYLPGILQIDKIYTIRPVRHHNRQLHKAAILKGGIRKSNQVGKYVFGYRLFDKVQFNEQDCFIWGRRTTGIFTIKTINGKMIKDGISFKKLKILEKSTSYLIA

SEQ ID NO: 20303 - protein, 419 aa, unidentified; identical to SEQ ID NO: 3670

SEQ ID NO: 20304 - protein, 431 aa, unidentified
MPNKVYVINKHGRPLMPCSPAKARHLLDGGKAKVKKRTPFTIQLLFGSTGYTQEVILGVDAGSKTIGLSASAETKELFSAEVKPRNDVVDLLSTRRESRRARRNRKTRYRKPRFDNRVRSKHKGWLALSEEVKIQEHITAIKMVCRILPVSKVVIETAEFDLQLLKAIADGKPVPQGEDYQKGEMYGHYNVRQYVLWRDGYTCQCCGAHTTKKKEVRLHVHHLESRKTGGDAPGNLVTLCDSCHEKLHKGLITEDDFKKRKRRSTRDATFMGIMRKTLMQRLCSELPIPVIETRGYITKATREKLLVLPKSHTNDALAIALGKQGFNVGYLPGIAQIDKIYTIRPVRHHNRQLHKAAILKGGIRKSNQAGKYVFGYRLFDKVQFNGQDCFIWGRRTTGIFTIKTINGKMIKDGISFKKLKPVEKSTSYLIA

SEQ ID NO: 20305 - protein, 420 aa, unidentified; identical to SEQ ID NO: 3685

SEQ ID NO: 20306 - protein, 515 aa, unidentified
MTALEERLSKTEYIYVLGFDGKPQMPTRRKRHVLKLLKTGRARIAEDIPFTIRLTYRNAPVLQPVTLAEDPGRTNIGAAVLSPLGDLLFAAVIETRNKEIKKLMADRKKSRQASRRGERKARQRLAKRYGSMVKSGMIIRKLPMYAADKFVTCKFIRNTQARFCNLKRCPDWITPTVQHLVQTHLNIIRKISRYLPVTDIAFEVSRFAFMHMENPEAMGVDFQNGPLKGYGDVKEAIRTHQHGKCLMCKKPIAHFHHIVPRSRGGSDTIQNLAGLCPECHTKVHTDTAFRKDFDEKKSGQLKKYGALSALNQAVPFICKKLLEEYGEEHVHFCRGLDTSLIRTALGFEKTKKNQMHEVDAYCIGLAALEVNEVETPAFDHTFQIRQFRRQDRSIIHHQTGRSYYQGKEKVAQNRKPGFEQKTTALSQWYEEQVRIHGEKEAEKLRSQLRVEKSCRHYNDMDRFLPGAVFLYEGKRYVLSGRITNGKYLRACGQGMKNFPAAECTFIRHNAGLVFI

SEQ ID NO: 20307 - protein, 445 aa, unidentified
MVFVLDKHKKPLMPCTEKRARLLLQRGRAVIHKMEPFTIRLRDRTLEKSNVQLLRLKLDPGSKTTGVAIIDESKPDCSRVIFLGEIRHKAGIKKSLDNRRAIRHSRRNRKTRYRKARFDNRKRPKGWLPPSLQARVDQTLNTVTKLRKFLPIAAISTEHVKFDTQFMQNAEISGIEYQQGELFGYEVREYLLEKWGRKCAYCGKTDVPLEIEHIIPKSRGGSNRVSNLTLSCKLCNQKKGTMTAAEFGFPEVQAQAKKSLRDAAMMNATRWALFNKLKKIGLPVECGTGARTKKQRIEHGLPKTHYYDACCVGISTPKRLMIIPQYISVWTVIGRGTRRMCNTDKYGFPKGHRTSKKMYFGFQTGDIVKAAVPKGKYMGTWIGRVAVRASGYFDLKDGQGKRICQGVSYKHCRLIQRANGWQYEKYLRKEKSRIPPTAKAVGFLR

SEQ ID NO: 20308 - protein, 420 aa, unidentified
MQYVYVLNKHGEPLMPCSPRKARLLLKQKKACVIKRTPFTVKLLYGSAGYKQPVTLGVDAGSKHIGISATTEKHELYREEATPRNDVVDLLSARRAFRRSRRNRKTRYRAPRFNNRVHSKHKGWLAPSVEVKIQEHITLIKHVCRILPVTLVRVETAEFDTQRLKAMLEGKPLPVGTDYQLGEMYDEYNVRQYVLKRDNYTCQCCGAHSTKTKGVKLHVHHIETRRIGGNAPNNLITLCKACHKALHAEKVTLDGKKRGKPLKDAAFMGIMRKTLMERLRKELKIPVQGTYGYITKYLREKNGIPKSHTNDARCISKNPLAIPCDTCYYTKAVRHHNRQLHKATILKGGIRKANQAPYIVKGYRLWDKVAYNGTECFITGRRTSGYFALKELDGTVVSNSISYKKLRLLEAATNYIIERK

SEQ ID NO: 20309 - protein, 430 aa, unidentified; identical to SEQ ID NO: 5683

SEQ ID NO: 20310 - protein, 493 aa, unidentified; identical to SEQ ID NO: 18058

SEQ ID NO: 20311 - protein, 449 aa, unidentified
MAVFVLDKQKRPLMPCTEKRARLLLQRGRAVVVRLAPFTIRLKDRVGGETQPLRVKLDPGSQTTGIAVVRESESIDPDTGEVERVEHVLWLGEIEHRGQAIRKALERRRNFRRSRRYRKTRFRAPRFQNRTRPEGWLPPSLQHRVDTTTSWVARLQRLAPISALSQELVRFDMQLMQNPEISGVDYQQGTLAGYELREYLLEKWNRTCAYCGKTEVPLQIEHIVARSKGGSNRPSNLTLACHRCNERKGNQPVEVFLKRKPEVLKRLQAQAKVPLRDAAAVNATRWALFAALKATGLPIETGSGGRTKYNRSRLAIPKTHALDAACVGRVDQVQGWNRPVLAIQATGRGAYCRTRAFKNGFPRGSLIRHKRVRGFQTGDWVRAEVPKGKQAGLHLGRVAVRKTGSFNIQMPGKTSEGISHRDCRLLQRADGYGYAFQPKPQMEAARGAA

SEQ ID NO: 20312 - protein, 470 aa, Blautia sp.; identical to SEQ ID NO: 2925

SEQ ID NO: 20313 - protein, 476 aa, unidentified
LEVVGTEGVSHPGLPGKYKYKGGQLMSVAVISKTGERLMPTSEYRARKLLKSGKAIKHSYHPFTIQLTERETGDIQPIELCMDTGYIHIGISVKSEKHEYLAEQIDTLTDERGRHDACHMYRRQRRSRKRYRQARFNNRKRDQGWIAPSLEHKKKIHIQAISRINKVMPITDITMEMGNFDTQVLKAKEEGKPLPQGAEYQHCERYGIATLREAVFARDDYKCQCCGRAIKDGAIFHVHHVKYRSKGGTNSISNLATVCDKCHTPKNHKPGGKLYNWKPKLSSFKGATFMTTIRWQLYSEVKALFSDIDIYIAYGAATKERRRELDIDKSHVNDAFAMGQFHPKHRIKAVLYKKKRRNNRCLEKFYDAKYIDSRDGKKRSGQELFNGRINRNHKKDSENLHQYRLQKVTAGKRTVRKQHYKIQPHDIVIYENRKRETAGCHCNGTRMMLLPDKKSSSIKKVKIYRYAGGYFKSAFN

SEQ ID NO: 20314 - protein, 415 aa, Bacillus sp.; identical to SEQ ID NO: 2431

SEQ ID NO: 20315 - protein, 443 aa, Anoxybacillus sp.; identical to SEQ ID NO: 3379

SEQ ID NO: 20316 - protein, 461 aa, Parasutterella sp.; identical to SEQ ID NO: 3646

SEQ ID NO: 20317 - protein, 453 aa, unidentified
PITIAEDPGRSNIGMAVVSLSGELLSAAVVQTRNKEIVKLMEKRKQHRRASRNGERKARQRLAKKCHTMIKAGSLMRKLPMYGKDKRVQCNVIRNTEARFCNRKREDGWLTPSAEHLVQTHINLIHKMQKFLPITDVAFEINRFAFLSLEDPSISGVDFQNGPLKGYDDLNAAIEDLQDGHCLMCNSPIEHRHHIVPRSMQGSNTIGNIAGLCCKCHERVHKDARFEDRLKKKKAGLNKRYAAVSALNQAIPFICKRLEQEFGKEHVHYCSGRDTSMVRRSFGYHKTKEEQLHEVDAWCIAVLSLRQIPEKAPEFDHVHELLQFRRQDRSRIKSQTSRAYYHEGKKIAKNRKKAEGQREDSLQEWRKQQVKRYGEEQTRKMISQLEIKKSIRRYNRLDRLMPGAVFYYQGIRYVMRGQHCEGTYLQAVGMGSKDFPAKKCKIVAHNEGLVFVS

SEQ ID NO: 20318 - protein, 432 aa, unidentified; identical to SEQ ID NO: 17289
  source 1..432: note = Cyanobacteria bacterium UBA8553

SEQ ID NO: 20319 - protein, 457 aa, unidentified
MDAVAVISASGKPLMPTNPVRARKLIKKGKAVIYKYRPLFTIRLTERTDGDIQTIEYCCDTGYQHIGLSIKSRKHEYVNEQRDLLPNETERHNDSRKYRKARRRRKLRHRACRRDNRHDNQICKDGYAPSIRNKRDQHISLYRSYTEILPVERAVFEMGQFDTQVLKAIEKGEPLPQGKDYQHGERYGYATLREAVFARDDYTCICCGKNAFKDKRILCIHHLGFRIGDRTNRLANLATVCTKCHTPKNHQPKGKLYNLKPELKDFKGATFMTMVRWDMLDKLKAVSKDIRVDVTYGAATKEARRDLKIKKSHANDAYCMGSFYPSHRTDLKRYEKCRRNNRVLSKFYDATYIDIRDGKKKKANALGCNRTKRRESRRSEKNERIYRGEKISKGRIVLRTRRAVIRPGDIVYVGKKKYIVASSKNLGAQLKLADGSLLTTSKVTKIIHCGGWKTIAL

SEQ ID NO: 20320 - protein, 456 aa, unidentified; identical to SEQ ID NO: 6866

SEQ ID NO: 20321 - protein, 378 aa, unidentified
MVYVISKQGTPLMPTERFGKVRRILKNSLAHVVRRIPFTIQLDYDTTEFAQPITLGIDAGSKHIGVSATTTEKELYAADVELRNDIVDKLSTRRKQRRTRRNRLRHRKPRFDNRVSSKNKGWLAPSIENKIHTHMSVVKNVCKILPVSNIVVETASFDMQKIKHLDIQGEEYQQGEQFGFWNVREYVLWRDGHVCQHCHGKSKDPVLNVHHLESRKTGGDAPSNLITLCETCHKAYHRGKFELKIKRGKPLRDAAFMGIMRWAFYKRLKKEHPNVSMTFGYITKNTRITNNLPKEHYVDARCISGHPKAKPMGYYFYQKKVRCHNRQIHKVNFLKGGRKRLNQAPFLVRGFRLFDLVSYEGILYYVFGRRRTAVEKNL

SEQ ID NO: 20322 - protein, 527 aa, unidentified
MGKGKWAARKPGITSGLENTWISKKPQGTGSGRAAAAYPYVDAGREGVSRKGFFMVAVVTCTGKPLMPTSAYRARKLLKAGRAVIYKYRPYFTIQLLDREDGEVQEIEYKSDTGSQHVGISVCTEKKELLSEQRDLPVMETEHHNDRRKNRRTRRNRKRYRKPRFDNRATKPVDGHQKWFAPSIRHKLEIQVRLFQEFCRVVPVTSAVFEMGKFDSQALKAILEGKPLPEGEDYQKGEQYGTDTLRAAVFLRDSHTCQFCKRSIKDGAFLHVHHVGYWKGDRTDRPANLATACEQCHTPANHGKHGILYGKEPEFHSLKDASYMTMVRWTMLEELREAAPEVAIRITYGVTTKRKRQKLKLPKSHVNDAYAMGKFHPVKRADTQYWQKTRRHDRILQRFYDAVYLDTRDGKEKKGNELSCGRINRNHKKDSENLRRCRGHKISSGYFSVRRDGNKLQPGSIVQYNGERMTVHGTHTSYRKNKKGEQVKYVNVEFTSPASDGRKSASLKKCSILSRNYNTGWKRYQPV

SEQ ID NO: 20323 - protein, 465 aa, unidentified
MSTCVCVLSNSGERLMPTFRLGNVRHLLKDGKAKIVKHHPFTIQLLYDSKTNTQPIEICEDVGYNYIGISVKSQSHEYVSAQYDTLQDEKACHDSCRKLRRTRRNRLRYRKPRFDNRKRGEGWLAPSLRHKKELNVNVVKMYCAVMPITHATVEVGSFDTMLVKAIQEGKAIPEGADYQKGPRYNLATLREAVFYRDNYTCQVCGRKIADGAILHMHHMFYWKGRHGDSLNELLTVCEKCHTPANHQKGGKLYGFGENVKFADLSGAAFMNTVRWQIVNELYAAFGKDFVTVTYGAMTKEKRIALRLEKSHNNDAYAMGEFHPNCRCTFEHYEKVRRNNRILEKFYDSRYIDIRTGEIATGKELFNGRINRNHKKDSENLHRYRGKRTYAGHRALLRKKVNLNPGDLVSLNGEVLVVHSTHTNKKGAVNVEFKTPGKSGQKSASLKKLKIVKAADSMHSAWEKIS

SEQ ID NO: 20324 - protein, 443 aa, unidentified
LTKDENRPSGRTTGLRAEQAEPAGIRKGDTLKVFVLNMRGKPLMPCSPAKARHMLKAGKAFVVRRTPFTIKLTIATGETKQDVTLGVDAGARHVGISATTEKEEVFASEVALRQDITGLLADRLAFRRARRNRKTRYRAPRFNNRVRSKHKGWLAPSVENRIQAHMSRIDAVCRLLPVTKIVIETASFDVQKIKNPTIEGTDYQQGDQLGFWNVREYVLFRDGHVCQHCHGRSRDKILNVHHLESRKTGGDAPNNLITLCETCHKAYHAGKIKLKVKRGQSFRAEAFMGIMRWTLLDRVRKTYPKLPVENTYGYLTKHKRIALGLPKTHCADAFCIAGNLKALRRGDFLFQQQTRKHNRQIHKCSILKGGVRKLNQAPFLVKGFRLFDKVRIGGQIGFVFGRRVRGTFNIRRLDKTVIGTDINCKKLSLLETRKTFLTELRKE

SEQ ID NO: 20325 - protein, 424 aa, unidentified; identical to SEQ ID NO: 4871

SEQ ID NO: 20326 - protein, 442 aa, unidentified
MVTVQQSTHHLPFGRVFIRRNLFMVYVISQDSKPLMPCSNPIARLLLKQGKAKVKRREPFTIKLIYETTDYTQDLTLGVDTGSGTIGAAVSKDNGDIVYMSEVVVRNDITDKMTQRAKYRRNRRNRKTRYRKARWLNRSNSIKKDRFSPTMQSKLHSHVKEIEYIQSILPITEMVFETGQFDMQLMKNPSLANPKVRPWGYQKGTNYGFENTKAMVLNRDNYTCQCCKGKHKDSKLEVHHIVFRSQGGSDEESNLITLCHTCHKDLHSGKINLKLSGKVKGNLKYATQMNSIRKQLFRLYPNAIETFGYVTKANRLHLGVDKEHYYDACTIATQGNAFNVKSDLYKKKCVSDGDFQKTKGIRSEQPIVTDKICGFRKFDKVRYFGKDYFIKGRMSTGYAILMDIDGNKIDFSTMPRGYKTPKLSNCKRITARSTVMTQVKVV

SEQ ID NO: 20327 - protein, 437 aa, Clostridium sp.; identical to SEQ ID NO: 3563

SEQ ID NO: 20328 - protein, 184 aa, unidentified
LLMVAVVDLFGKPLMPTNEYRARRLLKQKKAKIFGYRPFTIQLTERKSTEIQPIELCMDTGYIHIGISAKSERHEYLGMQIDTLTDEKLKRDDKRQYRRQRRNRKRYRAPRFDNRRRKEGWIAPSLEHKKEIHIDAIQRICKVMPITDITLEMGNFDTHVLKAVEEGKPLPQGSDYQHGERYGI

SEQ ID NO: 20329 - protein, 470 aa, unidentified; identical to SEQ ID NO: 2949

SEQ ID NO: 20330 - protein, 472 aa, Psychromonas sp.; identical to SEQ ID NO: 9157

SEQ ID NO: 20331 - protein, 338 aa, unidentified
LSARRALRQSRRSRNTRYRAPRFDNRIRTKRKGWLAPTVENRINVHLSRIETVLRLLPVTKITVETASFDTQLLKNPDIAGKEYQEGEQLGFWNVREYVLFRDGHVCQHCHGRSKDPVLNVHHLESRRTGGDSPGNLITLCETCHKALHRGEIKLKAKRGRSFRAETFMGIMRWGVLNRLKASHPKLEVHNTYGYRTKHARIANGIAKSHCADAFCIAGNFGAKRLGEFFFQKQTRRNNRQIHKLSILKGGIRKRNQAPYEIKGFRLFDKVACQGEEGFIFGRRSSGFFDVRKLDGTRISAGISYKKLHLLEKRRTYLTEIRKEEVLPPLPEGRGLRA

SEQ ID NO: 20332 - protein, 470 aa, unidentified; identical to SEQ ID NO: 5320

SEQ ID NO: 20333 - protein, 426 aa, Parasutterella sp.; identical to SEQ ID NO: 3045

SEQ ID NO: 20334 - protein, 512 aa, unidentified; identical to SEQ ID NO: 5549

SEQ ID NO: 20335 - protein, 394 aa, Psychromonas sp.; identical to SEQ ID NO: 8651

SEQ ID NO: 20336 - protein, 594 aa, unidentified; identical to SEQ ID NO: 4104

SEQ ID NO: 20337 - protein, 512 aa, unidentified; identical to SEQ ID NO: 18365

SEQ ID NO: 20338 - protein, 518 aa, unidentified
MTPKKRKEASRMSEYIYVIGVDGDPQMPTKRKRHVEKLLQAGRARVFRQIPFTIQLTYENKPVLQPITIAEDPGRSNIGMAVVSLSGELLSAAVVQTRNKEIVKLMEKRKQHRRASRNGERKARQRLAKKCHTMIKAGSLMRKLPMYGKDKRVQCNVIRNTEARFCNRKREDGWLTPSAEHLVQTHINLIHKMQKFLPITDVAFEINRFAFLSLEDPSISGVDFQNGPLKGYDDLNAAIEDLQDGHCLMCNSSIEHRHHIVPRSMQGSNTIGNIAGLCCKCHERVHKDARFEDRLKKKKAGLNKRYAAVSALNQAIPFICKRLEQEFGKEHVHYCSGRDTSMVRRSFGYHKTKEEQLHEVDAWCIAVLSLRQIPEKAPEFDHVHELLQFRRQDRSRIKAQTSRAYYHEGKKIAKNRKKAEGQREDSLQEWRKQQVKRYGEEQTRKMISQLEIKKSIRRYNRLDRLMPGAVFYYQGIRYVMRGQHCEGTYLQAVGMGSKDFPAKKCKIVAHNEGLVFVS

SEQ ID NO: 20339 - protein, 501 aa, unidentified; identical to SEQ ID NO: 9337

SEQ ID NO: 20340 - protein, 417 aa, unidentified
MLVYVLKQNGQPFMPTERFGKVRRLLKEGKAKVVRREPFTIRLLYEPKTDVVQECYCGVDTGSKHIGVAVVGNDKVLYQSQTELRSDIKKKMNRKRASRRNRRNRKTRYRKPRFLNRRNSIREDRLPPSVKHKVQAHIDEIEFCKKILPISDLILEVSQFDTALMKNPSLMNEKVKHWGYQKGFNYGYSSRRSAILHRDNYTCQCCGKKNCRLEVHHIKFRSNGGTDDEENLITLCEDCHKGVHAGMVVLSKKPKKSKNLKYATHMSIIRSYLLQKYPNTIETFGFVTSENRNHLNLPKDHYIDACVIASGGLEFKELDVIFYKRRVSKGDYQLTKGIRGEQKLPIGKIYGFRKFDKVKYLGKEYFIKGRISKGGYAVLMDVFGNKVDFSSMSKGHKTPKLSNCDRISTRRSCLCIS

SEQ ID NO: 20341 - protein, 455 aa, unidentified; identical to SEQ ID NO: 12675

SEQ ID NO: 20342 - protein, 458 aa, Scytonema sp.; identical to SEQ ID NO: 12967

SEQ ID NO: 20343 - protein, 470 aa, unidentified; identical to SEQ ID NO: 2949

SEQ ID NO: 20344 - protein, 431 aa, unidentified
MPNKVYVINKHGRPLMPCSPAKARHLLDDGKAKVKKRTPFTIQLVYGSSGYTQEVILGVDAGSKTIGMSASTTKEELLSAEVKPRNDVVDLLSTRREFRRARRNRKTRYRKPRFDNRVRSKHKEWLAPSVEVKIQEHITSIKRVCRILPVSKVVVETAEFDLQLLKAIADGKPVPQGEDYQKGEMYGHYNVRQYVLWRDDYTCQCCGAHATKKKEVRLHVHHLESRKVGGDAPDNQVTLCESCHEKLHKGLIAEKDFKKRKRRSTRDATFMGIMRKTLMQRLCSELPIPVIETRGYITKATREKLLVLPKSHTNDALAIAQGKRGFNVGYLPEIAQIDKIYTIRPVRHHNRQLHKAAILKGGIRKSNQAGKYVFGYRLFDKVQFNGQDCFIFGRRTSGYFVVKTIDGKVIHNSASFKKLKLVERASNYLIA

SEQ ID NO: 20345 - protein, 431 aa, unidentified
MPNKVYVINKHGRPLMPCSPAKARHLLDAGKAKVKKRTPFTIQLVYGSSGYTQEVILGVDAGSKTIGMSASTTKEELLSAEVKPRNDVVDLLSTRREFRRAQRNRKTRYRKPRFDNRVRSKHKGWLAPSVEVKIQEHITSIKRVCRILPVSKVVIETAEFDLQLLKAIEEGKPVPQGEDYQQGEMYGHYNVRQYVLWRDGYTCQCCGAHATKKKEVRLHVHHLESRKVDGDAPDNQVTLCESCHEKLHKGLIAEKDFKKRKRKSTRDATFMGIMRKTLMQRLCSELPIPVIETRGYITKATREKLLVLPKSHTNDALAIAQGKQGFNVGYLPGIVQINKIYTIRPVRHHNRQLHKATILKGGIRKSNQTEKYVFGYRLFDKVQFNGQDCFIWGRRTTGIFTIKTINGKMIKDGISFKKLKLAEKSTSYLIA

SEQ ID NO: 20346 - protein, 417 aa, unidentified
MVYVLNTDGVPLMPCSAAIARLLLKEGYARVKCRTPFTLKLLRIPETTYTQSLTHGVDTGSDKIGSTVVTQQGDVVYTSEVTIRNDINKKMTGRKSCRRNRRSRKTRYRAARFANRGNSIRSDRFSPTMTSKINAHLKEVSYVASILPITTLIVETGNFDPHALKNPDVLKDPSLYQKGVNYGFANTKAYVLCRDGYVCQHCKGKSKDTRLHVHHLVYHSNGGSDDEANLLVLCETCHRGVHDNSIVLKKNGKRKGQLKHATQMNSIRVQCLRALPHAQETFGFITKEHRQLLGLEKSHINDAAVIASQGNVINFNGTKLLEKKCVSDGDYQQMKGIRGQQRIPTGKIKGFRKFDKVRYQGVDCFIKGRMSTGYAILMDINGEKLTFSNTPKFNGMKRLSARTSWIMSQKTTANICS

SEQ ID NO: 20347 - protein, 430 aa, unidentified; identical to SEQ ID NO: 3555

SEQ ID NO: 20348 - protein, 421 aa, Ktedonobacter sp.
MNVVYVLSPDRVPLMPCSCAIARLLLKQGKAKVVRRTPFTIKMYTQPVDTHTQPLTLGIDTGSAVIGSAVSDECGNILYVSEGEVRNDIAQTMKNRATSRRNRRYRKTRYRPARWLNRRNSLKTGRFSPTMTSKTEAHLREIRFVQSLLPIQSRVLETGTFNPHALKHPAVLQNKWMYQKGINYGLANTKAYVLTRDGYVCQRCKGQSKDRRLEVHHIVFRSQQGSDEEANLLTLCKTCHEGLHAGTVTLKQKGKRKGNLLHATQMNSIRIQLLSRVEAIETWGFVTKEHRLLAGLPKEHIFDAAMIATRGNIPVFQTTEVLLKKCISDGDYQQTKGKHSQQRIPTGKIAGFRKFDKVRYLGVEYFIKGRMSTGYAILMDLSGNKLALKPTPKFDNMKRVSARSSWIINQKAMPSFSSSPT

SEQ ID NO: 20349 - protein, 446 aa, unidentified; identical to SEQ ID NO: 14643

SEQ ID NO: 20350 - protein, 315 aa, unidentified
VYKRQHKGWLAPSVEVKIQEHITTIRRVYGILPVSKVVVETAEFDLQLLKAIADGKPVPQGEDYQKGEMYGHYNVRQYVLWRDDYTCQCCGAHATKKKEVRLHVHHLESRKVGGDAPDNQVTLCESCHEKLHKGLIAEKDFKKRKRRSTRDATFMGIMRKTLMQRLYSELPIPVIETRGYITKATREKLLVLPKSHTNDALAIAQGKRGFNVGYLPEIAQIDKIYTIRPVRHHNRQLHKAAILKGGIRKSNQAEKYVFGYRLFDKVQFNEQDCFIWGRRTTGIFTIKTINRKMIKDGISFKKLKLVEKSTSYLIA

SEQ ID NO: 20351 - protein, 361 aa, unidentified
LSKVKTMRVFVFNMRGRPLMPCSQRKARLLLRENKAKIYKYHPFTIQLTYTTGETKQDCHIGIDTGSKYIGAAVRSEDKVFWKGEIELRQDIRSNLDTKRIYRRSRRNRKTRYRKPRFLNRKRRDEWLPPSLQSRINHTFHWIDTLSSLVPNPILHIEVGKFDVAKMINPEIHGVDYQHGQTYGFFDERYFVFARDNYTCQCCGKSKNKILNTHHIIYRSNGGTNRVDNLITVCTDCHTSQNHRKGGIFYQWQEQHKKVKQYKEPPFMNTLRKRIFVAYPDAEITYGSETTPKRKAMKLDKTHYNDAIVISGINEIKENPEEWLLIKQFRKKKRSLHEATARKGRKKPNRNQTRNSKNTPY

SEQ ID NO: 20352 - protein, 346 aa, Arthrospira sp.; identical to SEQ ID NO: 2872

SEQ ID NO: 20353 - protein, 457 aa, unidentified
MDAVAVISASGKPLMPTNPVRARKLIKKGKAVIYKYRPLFTIRLTERTDGDIQTIEYCCDTGYQHIGLSIKSRKHEYVNEQRDLLPNETERHNDSRKYRRARRRRKLRHRACRRDNRHDNQICKDGYAPSIRNKRDQHISLYRSYTEILPVERAVFEMGQFDTQVLKAIEKGEPLPQGKDYQHGERYGYATLREAVFARDDYTCICCGKNAFKDKRILCIHHLGFRIGDRTNRLANLATVCTKCHTPKNHQPKGKLYNLKPELKDFKGATFMTMVRWDMLDKLKVVSKDIQVDVTYGAATKEARRDLKIKKSHANDAYCMGSFHPSHRTDLKRYEKCRRNNRVLSKFYDATYIDIRDGKKKKANALGCNRTKRRESRRSEKNERIYRGKKVSKGRIVLRTKRAVIRPGDIVYVGKKKYIVASSKNLGKQLKLADGSLLTTSKVTKIIHCGGWKTVTL

SEQ ID NO: 20354 - protein, 514 aa, Nocardiopsis sp.; identical to SEQ ID NO: 6273

SEQ ID NO: 20355 - protein, 470 aa, unidentified; identical to SEQ ID NO: 2949

SEQ ID NO: 20356 - protein, 415 aa, unidentified
VLGQDGHPLMPTCRHGKVKRMLKSRMAKVVKKCPFTIQLQYESTTHTQKINLGIDAGSKTIGVSATTESKVLYESEVVLRNDIVELLSGRRALRRSRRNRKTRYRKPRLDNRRRPDGWLAPSIRQKIKTHVTVVENVMKILPVTKIIVETASFDIQKIKNPEIEGAEYQYGEQLDFWNVREYVLFRDGHTCQCCKGKSKDNILNVHHIESRKTGGNAPNNLITLCETCHKAYHKGVITLPKEIHRGMRFRDAAFMGIMRWAFYDRLKELYTPFGVEVINTYGYITKNTRIEHGLPKEHYVDARCISGNPAAKPLGHYYFQKKVRCHNRQIHKNTILKGGIRKRNQAAYLVKGYRLFDKVKYQNQEYFIFGRRSSGFFDIRTLDGTKVNKGSISCKKLQLVEKSKHYLTEQRKVTT

SEQ ID NO: 20357 - protein, 502 aa, unidentified; identical to SEQ ID NO: 2616

SEQ ID NO: 20358 - protein, 450 aa, unidentified; identical to SEQ ID NO: 4205

SEQ ID NO: 20359 - protein, 430 aa, Desulfobacter sp.
LSVFVLDTNKKPQNPVHPAKARLLLTEGKASVFRQFPFTIILKETVLDVASNPLRIKIDPGSRETGIAVINDDTGEIVFAMELRHRGWQIKNNLESRRAIRRSRRNRKTRYRKPRFDNRTRAKGWLPPSLKSRVHNIETWVNRLCRFCNIQAISMELVRFDMQKIQNPEISGVAYQQGELMGYEVREYLLEKWDRTCAYCGKTDIPLEIEHIVPRSKGGSNRVSNLTLACTACNRKKGNKPLEEFLSRKPGLLKRIQKQSKVPLKDAGAVNTTRWDLFRTLKKTGLPVETGSGGLTKFNRTTRGLYKTHWLDAACVGKSTPEKMFQIDKAVLIVKADGHGSRQMCRVNKFGFPRTTAKSTEKKVKGFQTGDIVKAVVTSGKKVGTYIGRVAVRKSGSFNIKTVDKTVQGISWKYCRLLHASDGYSYNTTC

SEQ ID NO: 20360 - protein, 423 aa, unidentified; identical to SEQ ID NO: 3951

SEQ ID NO: 20361 - protein, 426 aa, unidentified
MVFVLDKSKKPLDMISHAKARILLKNRLAVVHKIYPFTIRLKDNSCVGNDKTYTVKFDPGSKHTGVAITDNKDSVVMLAEIEHRGHLIKKDLTSRRMIRRHRRNRKTRYREARFQNRTKPEDWLAPSVKSRANNVINFIKKYKKILNINKVLIERVSFDVAQMTSDTKLWGVAYQQGPLYQTKLKSYLFKKCNGRCVYCGNKAEEIEHIIPKSKGGTNSPYNLVIACKKCNKLKGKSSLKEFGELMNKDYSHLEPKNLPRDASIVQAARNYMVKEITKLVSDTTLHDAWLTKYNRDELGLPKEHYYDALSVGEIPSKFNFLTDKILLISAKGRGSRQMCRVDKYGFPRTSPKGSKSVKGFQTGDMVKAIVPKGLKQGEYLGKVAVRSSGKFDIQTKTKTIEGINHKYCHLIQRGDGYLYSYKEREF

SEQ ID NO: 20362 - protein, 515 aa, unidentified; identical to SEQ ID NO: 5017

SEQ ID NO: 20363 - protein, 439 aa, Lactobacillus sp.; identical to SEQ ID NO: 17347

SEQ ID NO: 20364 - protein, 446 aa, Pseudomonas sp.; identical to SEQ ID NO: 10661

SEQ ID NO: 20365 - protein, 420 aa, unidentified; identical to SEQ ID NO: 2681

SEQ ID NO: 20366 - protein, 406 aa, unidentified
MVYVQDINGKPMMPTTRHGKVRRLLKDKKAVVVNLCPFTIKLMYVTSDYKQEIVLGVDAGTKHVGLSATTKSKELYSSEVILRNDIVDLLSTRRELRRARRNRLRYRKPRFNNRIKSKRPGWTAPSVKYKIDAHIRVIDNVYSILPIFRIVIEVAQFDTQKIKNPEISGKGYQEGDQLEFWNTREYVLARDGHKCQYCKGKSKDSILNVHHIESRKTGGDSPSNLITLCETCHKEYHKGNIDLKIRRGKSLRDAAVMGIMKWRLYEELKSRYDRVFMTFGYITKHNRIKYGIEKSHTSDAFVISKNINAKRIERQYLKRLIRRHNRQIHKMKILKGGKKKNNQAPFEVFGFRLFDKVLYNNKIFFVYGRRKSGSFNIRDFNGENSKDVSRKKFKLIRGKRHLIILK

SEQ ID NO: 20367 - protein, 412 aa, unidentified; identical to SEQ ID NO: 3155

SEQ ID NO: 20368 - protein, 407 aa, unidentified; identical to SEQ ID NO: 4911

SEQ ID NO: 20369 - protein, 277 aa, unidentified
MPNKVYVINKHGRPLMPCSPAKARHLLDEGKAKVKKRTPFTIQLVYGSSGYTQEVILGVDAGSKTIGMSASTTKEELLSAEVKPRNDVVDLLSTRREFRRARRNRKTRYRKPRFDNRVRSKHKGWLAPSVEVKIQEHITSIKRVCRILPVSKVVIETAEFDLQMLKTIADGKPVPQGEDYQKGEMYGHYNVRQYVLWRDNYTCQCCGAHATKKKEVRLHVHHLESRKTGGDAPDNLITLCESCHEKLHKGVIAEGDCKSVSVVPHGMPHSWASCGRL

SEQ ID NO: 20370 - protein, 461 aa, unidentified
MQRVFVLDATGEALMPCHPARARKLLKAGRAVVVHQQLFTIKLLDRVGGETQPVMLKLDPGSRVSGLVLVGHFARGAEVLWAGELTHRGPAIRDNLTQRASVRRSRRSRKTRYRKPRFLHRRRRAGWLAPSLQSRVDNILSWVRRLRGWCPVSGLAMELVRFDTQLLQNPEISGVEYQQGTLHGYEVREYVLEKWGRQCAYCDATGVALQVEHIQARTAGGSHRVSNLTLACEDCNQAKGSQDIRTFLAHDPPRLARILAQAQTPLRDAAAVNSTRWALYEALQVMELPLEGGTGGRTKYNRTQQAYPKAHWVDAACVGVSGAQVALDPAMPILQIKAMGRGSRQMCRMDKYGFPRTGPKRFKRVQGFQTGDLVVAVVLTGKKAGRYVGRVAVRASGYFNILTRQGTLVQGIPARCCRVQQRADGYHYAIGPVWCDEASLPQCLASPLLSSSGSKPEVSRS

SEQ ID NO: 20371 - protein, 462 aa, unidentified; identical to SEQ ID NO: 7335

SEQ ID NO: 20372 - protein, 424 aa, unidentified; identical to SEQ ID NO: 3434

SEQ ID NO: 20373 - protein, 408 aa, unidentified; identical to SEQ ID NO: 11651

SEQ ID NO: 20374 - protein, 461 aa, Verrucomicrobium sp.; identical to SEQ ID NO: 6401

SEQ ID NO: 20375 - protein, 270 aa, unidentified
LQLLKAIEEGKPVPQGEDYQQGEMYGHYNVRQYVLWRDSYTCCICGVHGSVRKGVPLHVHHLESRRVGGDAPDNLVTLCTACHDKLHKGIIMAADIKKRKRRSTRDATFMGIMRMTLLRRLREQLPVPVVETRGYITKATRENLLVLPKSHANDALAIAHGPQGFRAEHLPNIRQADRLYTIRPVRHHNRQLHKATILKGGVRKTNQAEKYICGFRLYDKVLYNGIECFVWGRPTSGSFLLRQLNGEKVKDGVSYKHLKLLERSQSYLVA

SEQ ID NO: 20376 - protein, 489 aa, unidentified
VQNKDGKPLMPTTRYCYVRLLLKEKKARVVCTTPFTIQLNYDTPDITQDLILGIDPGRTNIGVAVVKEDGQCVFSAHLETRNKEVPLLMKKRVAFRRNHRTLDRRRKRQRRAKAAGTTIAEGSVERLLPSYEKPVVCHYIRNKEARFNNRSRHQGWLTPTANHLLQTHINLIAKIAKFLPITKMVVELNRFAFMAMDNPNIRRWEYQQGPLYGLGSVEDAVYAQQDGHCLFCKKPIDHYHHVVPRHKGGSETLANRCGLCERHHALVHKDKAWAEKLVTRKGGMNKKYHALSVLNQIIPFLMEYLGEETPYDVYATDGKSTKGFRVAKYVPKEHYTDAYCIACAILGADTKVSAPVEPFELKQFRRHDRQACIRQMVDRKYLLGGEVVATNRRKAIEQKSDSLQEFRDAYGDAAVSQLTVRPHSPQYKDMARIMPGAMMDFDGAVGVFQGSSGRNNGTPNYYNSTKGARVLTKRCALLAKNVGMVFIPA

SEQ ID NO: 20377 - protein, 426 aa, unidentified; identical to SEQ ID NO: 3604
  source 1..426: note = Cyanobacteria bacterium UBA11149

SEQ ID NO: 20378 - protein, 263 aa, unidentified
MVYVVANDGQPLMPTERHGKVCRMLKSGMAKVVKKCPFTIQLQYESERNVQPVSLGVDAGSKHIGISATTKTKVLYESDVELRDDIVKLLATRRQLRRSRRSRKTRYRPVRFDNRKRKEGWLAPSIRQKIGSHLTVVANACKILPINQIIVETASFDIQKIKDPEIQGIEYQQGEQMDFWNIREYVLFRDGHICQCCKGRSKDKILNVHHIESRKTGGNAPNNLITLCETCHKGYHNGTVILPKNIKHGMHLWVSCAGHSTTH

SEQ ID NO: 20379 - protein, 451 aa, unidentified; identical to SEQ ID NO: 5203

SEQ ID NO: 20380 - protein, 460 aa, unidentified
MWTNRPQGLAYNILRKEAASVVYVLNKDGKPLMPTNRCGHVRKLLKSGKAIVVKRKPFTIKLTYDTPDCVQPISLGVDTGYTHVGVSAVTDTQEVYAAQVELLTGQKKRLDDRRKYRRTRRNRLRHRPPRFNNRRRNPGWLPPSLQHKVDSHIRIVEGIKAILPITEVHFEIGNFDTHKMKKPSIRPWQYTEGEMKGFDSVKEYVKNRDNYTCQLCGKQHKDGKGLVVHHFLYWKGRHSNNPNEMVILCDTCNSVANHEKSGPLWGWEPKQLRQLQQATFMNALAVRLMTVYPDADFMYGELTAQHREEYNIPKSHTNDAFIIAGGKSQLRFDFPFNVEQRRRNNRSLEKFYYAKYIDSRDGSKQPGKVLSSIRVKRKTPPKDSGFRQFRQSKVSKGKRYIRKKRHFYQPGDLVITPLGKAIVKGTICSGNSIQFYNFSRTFAPSKVEPIKFGKGFCFQT

SEQ ID NO: 20381 - protein, 509 aa, unidentified
VYVLNKDGKPLMPTTRCGHVRYLLKEKKARVVKTKPFTIQLLYETNDVVQPLYLGIDPGRTNIGVAVVKADGTAVFTAHLETRNKEIPKLMQGRKKARRARRTNGRRCRRQRRAKANGTISKKCVKQTTAQNGSVSKRAKKIGVIKRHLPGCEKEVLCIGIKNKEAKFSNRTRPEGWLTPTANQLLQTHINLVKKIQKFLPISDVVLEINKFAFMQLDNPNIQKWQYQQGPLYQKANLEEAVSEMQEHHCLFCKNTIDHYHHVVPQHKNGSNTIGNIVGLCAKHHDLVHKDTSWQEKLAKKKTGLNKRYGALSVLNQIIPALTKELSSLFPKHFFATNGKSTYDYRAAHGVSKDHWLDAYCIAGSVLPNDACDNNINSHVPYELKQFRRHDRRALHKENMSRVYTLNGKSVATNRHKAIKQTTDSLEEFRQRQPNDVCKLKVKEHHPEYRNPKRSFPGCVFLVGKQTHVMQGTSGSHNGKADGYYDTNGNSYSSGKCKFVAKNEGIVFA

SEQ ID NO: 20382 - protein, 409 aa, unidentified
MVYVLNIQGKPLMPCKKAKARKLLKQGKAKVIKKEPFTIQLIFECENQVQEVTLGVDAGSKAIGLSVTTDKDELFSAEVELRNDIVDLLSTRRQNRRTRRNRLRYRKPRFLNRVGSKNKGWLAPSIENKINTHLKVISKIYEILPISKTIVEVASFNIQKIKNPDIQGKEYQQGEQLDFWNVREYVLFRDGHKCQGKKNCKNKILNVHHIESRKIGGDSPNNLITLCENCHEDYHDGRLKLNLKRGQSFRDATFMGIMRWSFYNRLKEIYPNVQMTYGYITKNTRIVNGLPKEHRIDALCISGNLSVKQSEYWYYIKQIRKHNRQIHKANILKGGKKKLNQAPYEVKGFRLFDKVKYKGQECFIFGRRSSGYFDLRKLDKVVVHRSASYKDLELIQKSNSLLIERRSAG

SEQ ID NO: 20383 - protein, 390 aa, Moorena sp.
LSDLEVENCTTHNHQLKIDPGAKTTGLAILQNDTVIWSAEITHRGFQIRDALTSRRQLRRSRRNRKTRYRKPRFLNRKRPSGWLAPSLMSRVHNILTWVKKLIRLCPIAGIFQELVRFDTQKMENPEISGTEYQQGTLCGYEIREYLLEKWNRKCAYCGATDVRLEIEHIKPKSLGGSDRVNNLAIACHDCNQTKGNQEIEQFLSGKPDILKRILSQAKRSLADAAAVNSTRWKLYNELKLTGLPVKTGSGGQTKYNRRQFSLPKTHWLDAACVGDVQSIFVEDYQILSIVAKGHGTRQICRTDKFGFPKRYCSRTKIHKGFQTGDIVKAVVTKGKKIGTYVGRVATRKTGSFNISTANGLIQGISYKYCTPIHKKDGYAYQINTLPSLS

SEQ ID NO: 20384 - protein, 414 aa, unidentified
MPCSPAKARLLLKEKKAIVKRRTPFTIQLTIATGETKQPVGLGVDAGYKHVGLSASTDKAELYASQVELRQDITDLLSARRALRRARRNRKTRYRAPRFNNRIRTKRKGWLAPSVENRINAHLSRIEAVLRLLPVTKITVETASFDMLLLKNPDIAGKEYQEGEQLGFWNVREYVLFRDGHVCQHCYGRSKDPVLNVHHLESRRTGGDSPGNLITLCETCHKALHRGEITLKTKRGHSFRAEAFMGIMRWEVLNRLKASHSELEVNNTYGYRTKHARIVNGIDKSHCADAFCIAGNLGAKRLGEFFFQKQTRRNNRQIHKLSILKGGIRKRNQAPFEAKGFRLFDKVACQGEEGFIFGRRSSGSFDVRKLDGTRISAGISCKKLRLLEKRRTYLTEIRKEEALPPLPEGRSLRA

SEQ ID NO: 20385 - protein, 294 aa, Parasutterella sp.; identical to SEQ ID NO: 18518

SEQ ID NO: 20386 - protein, 396 aa, unidentified; identical to SEQ ID NO: 4508

SEQ ID NO: 20387 - protein, 415 aa, unidentified
MVYVLDKDGHPLMPTNRHRKVRRMLKSGQAKVVKKCPFIIQLMYESEHNVQSVSLGIDAGSKRIGVSATTKTTVLYEADVELRDDIAKLLATRRQMRSSRRSRKTRYRPKRFDNRRREKGWVAPSIRQKINTHLVTVARVCENLPVSQIIVETASFDIQKIKNPEIQGVEYQRGEQMDFWNVREYVLFRDGHVCQCCKGKKKDPILNVHHIESRKSGGDAPNNLITLCETCHKGYHNGTIKLPKKIKRGMKFKDAAFMGIMRWTFYNTLKEKYEPDIPVSMTYGYLTKNTRIQHNLPKGHHIDARCISGNPDAKSDGVYYYQKKIRCHNRQIHKFNTLRKGVRKLNQSDYLVKGYRIFDKVRYQGKEYFIFGRRKKGFFDIRTLSGEKVNNGSLSIKKIAFVDTRKNYITERRTV

SEQ ID NO: 20388 - protein, 420 aa, unidentified; identical to SEQ ID NO: 2647

SEQ ID NO: 20389 - protein, 427 aa, unidentified
MNNVVFVLDTDKRPMTPCSPARARQLMRQGEAAVYRRHPFTLILKEARPDAIVKALTIKIDPGAKTTGFALMDAAHRVLFAAELTHRGRAIKESLDARRALRRDRRNRKTRCRAARFDNRRRPKGWLAPSLQHRVATTMTWVGRFRRWTEIDAIALERVKFDMQKMQNPEISGVEYQQGALAGYQVREYLLEKFNRQCVYCGAKDVPLEIEHVHPKALGGSDRVSNLTLACRPCNEKKGATPVDVFLKGRPAVLAKLKAQLKKPLAAAAAVNATRNALFDALLATGLTVETGDGAQTKFNRTRQGYGKAHWIDAACCGDSGAAITLDPAMQPLRIQATGHGNRQMCGTDKYGFPIRHRQTIKRHFGFETGDLVRAVVPMGKRKGTHVGRLLCRASGSFDISTSNGRAAGISHRYCRILQRLDGYAYA

SEQ ID NO: 20390 - protein, 423 aa, Clostridium sp.; identical to SEQ ID NO: 5342

SEQ ID NO: 20391 - protein, 507 aa, unidentified
MSEYIYVLGIDGNPQMPTKRKRYVEQLLQTGRARIFRQVPFTIQLTYKNEPVLQPVTIAEDPGRSNIGMAVVSLSGELLSAAVVQTRNKEIVKLMEKRKQHRRASRNGERKARQRLAKKCHTMIKTGFLMRKLPMYGKDKRVRCNVIKNTEAKFCNRKREDGWLTPSAEHLVRTHINLIHKMQKFLPITDVAIEINRFAFLSLEDPSISGVDFQNGPLKGYDDLNAAIEDLQDGHCLMCNSPIEHRHHIVPRNMQGSNTIGNIAGLCCKCHERVHKDARFEDRLKKKKAGLNKRYAAVSVLNQAIPFICKRLEQEFGKEHVHYCSGRDTSMARRSLGYHKTKEKQLHEVDAWCIAVLALQHVPEKAPEFDHVHEILQFRRQDRSRIKAQTSRAYYHEGKKIAKNRKKAEGQREDSLQEWRKRQVERYGKEQTRKMISQLEVKESIRRYNRLDRLMPGAVFYYQGVRYVMRGQHSNGQYLQAVGMGDKDFPAKKCKIVVHNQGLVFVS

SEQ ID NO: 20392 - protein, 465 aa, unidentified
MSTCVCVLSNSGKRLMPTFRLGKVRHLLKDGKAKIVKHHPFTIQLLYDGKTNTQPIEICEDVGYNYIGISVKSQSHEYVSAQYDTLQDEKACHDSCRKYRRTRRNRLRYRKPRFDNRKRSEGWLAPSLRHKKELNVNVVKMYCAVMPITHATVEVGSFDTMLVKAIQEGKAIPEGADYQKGPRYNLATLREAVFYRDNYTCQVCGRKVADGAILHMHHMFYWKGRHGDSLNELLTVCEKCHTPANHQKGGKLYGFGENVKFADLSGAAFMNTVRWQIVNELYAAFGKDFVTVTYGAMTKEKRIALRLEKSHNNDAYAMGEFHPNCRCTFEHYEKVRRNNRTLEKFYDSRYIDIRTGEIATGKELFNGRINRSHKKDSENLHKYRGKRIRKGYRALRRKKVALNPGDLVSLNGEILTVHGTHTKKNGSVNVEFKTPSKSGKKSTSLKKLKIIKTISPMRSAWDKVS

SEQ ID NO: 20393 - protein, 477 aa, unidentified; identical to SEQ ID NO: 17885

SEQ ID NO: 20394 - protein, 448 aa, Eubacterium sp.; identical to SEQ ID NO: 9395

SEQ ID NO: 20395 - protein, 458 aa, Scytonema sp.; identical to SEQ ID NO: 11397

SEQ ID NO: 20396 - protein, 456 aa, unidentified
MSTCVCVLSNSGKRLMPTFRLGKVRRLLKDGKAKIIKHHPFTIQLLYDSKTNTQPIEICEDVGYNYIGISVKSESHEYVSAQYDTLQDEKEHHDDCRKYRRTRRNRLHYRKPRFDNRKRDDGWLAPSLEHKKELNVNVIKMYCEVMPITHAIVEVGSFDTMLVKAIEEGKATPESADYQKGPRYKLATLREAVFYRDNYTCQVCGRKANEGAILHVHHMFYWKGRHGNSLSELITVCEKCHTPANHQKGGKLFGFGEDKEFANLSGAAFMNAVRWQIVDALHATYGKEFVTITYGAMTKEKRIILGIEKTHNNDAYAMGDYHPVHRCVFRHYQKRRRNNRVLEKFYDATYIDTRTGNKAKGKELFNGRISRNHKKDSEDLHKYRSKKVSKGRCSIRRQRYAIQPYDTVRLESKTYITSGCHNKGTRLLIPANGKSKSVAISKVQVVCHAGAWIQII

SEQ ID NO: 20397 - protein, 535 aa, unidentified
VLRPRYQYPTRWYPSREQGSGNGCLSGEENTDLEQEVSGTLSKGDHSHPGEQDFCVPAITIQGGPAMSVFVVGLNGCRLMPTSERKARLLLKHGKASVYRKVPFTIKLNYKTGSTTQSGYLGIDTGSQHIGVSVVREDGTVLHKEEIGLRDSMSKRKLMQSRASSRRGRRHRKTRYRHPKWRPKAKRVYCEIPDRKGRHWKKKEITFASKRPKGWLPPSLQSKTDHHIWWIKKLQDLLPEGYRLSIELGRFDPARLKDPEIHGELYQKGPQYDYENVRAYVLNRDRYTCQVCGKKGGKLHVHHILYRSHGATDDPQYMATVCSDCHNTENHQQGGILYQWMQKQKKFTRGLRDATFMNILRKRLIEAFPGATFTYGNITKADRERLRLPKSHGNDATAIAIVKTGIMTVKDKEPVIYIQQVRRKKRSLHEETPRKGRKEPNRTASRYDKNTKAVTVTKRKNKKISITGCLFDRVELNGKKGWISGFTDKSCYVKDENDQYIRTSPKYKQVSLSKLKILHHCGNWAIGAKRSLGKG

SEQ ID NO: 20398 - protein, 448 aa, unidentified
LAKGKLLRKEVHFLLVYVLNKHGRPLMPCKPSKARKLLKQGKAKIVKYEPFTIQLLYGSSGYKQKCVLGIDAGSKNIGLVVTIEDGRVIYKAQATLRQDIRENIETRRRLRRTRRHRKTRYRKPKTFTSKWGNGWLSPSIRARIDAHYNIVKKICSIMPIKEIVVEVGQFDVQAIINPDIQGEEYQNGELKGFDSVKEYVKIRDNFQCHYANLRPDIPCSGKLTVDHIIPRSRGGTDNPTNLVCCCEMHNMAKGNMSYKKFTGHEPPSIRDFRPTVFMNVLMKHLVPRLQELAPTKYTFGYVTRRRRKEWGLEKSHINDAIAIAGIKPRWQDNVWYYIRQVRKKKRSLHEEIPRKGRNKPNREAKRNNKNVKEIVTKSGKWCLWDKVKITTTGGIGFISGFTGKWVYVQDIDGNYLQLSDKYKQINPSELVLICRNNNYVTQQFISHL

SEQ ID NO: 20399 - protein, 442 aa, unidentified
MSTSVFVLDKKHRPLMPCRPARARRLLRAGRARVVKRFPFVIRLVDRTVEQSEVQPVLIKLDPGSRETGAAVVRDDEKKRHHALAFFVIKHRGGAIRDALKARSAFRRRRRSQNLRCRSPRFLNRVKPKGWLPPSLRHRVETTLSFVRRMCRYLPVSGIATELVKFDSQKLQTPEVSGIEYQQGTLFEYEVREYLLEKFGRKCVYCGAEGVPLNIDHVVPRAKGGSNRVSNLVLACVSCNQKKGARSLEDFLKGKPEVLARVRRELKTPLRDAAAVNATRWVLFNELKATGLPVETGSGALTKFNRHAFGVEKEHWLDALCVGRLNGVVTRKGLNVLEIRCMGRGSRQRTRLTKYGFPRGYLMRQKCVHGFATGDMVEANVPKGKKAGLWRGRVAVRVSGSFNIQTPKGVIQGVGWKHCRLISHNDGYGYAWLGHAPHSSPA

SEQ ID NO: 20400 - protein, 419 aa, unidentified; identical to SEQ ID NO: 3628

SEQ ID NO: 20401 - protein, 457 aa, unidentified
MDAVAVISASGKPLMPTNPVRARKLIKKGKAVIYKYRPLFTIRLTERTDGDIQTIEYCCDTEYQHIGLSIKSRKHEYVNERRDLLPNETERHNDSRKYRKARRRRKLRHRACRRDNRHDNQICKDGYAPSIRNKRDQHISLYRSYTEILPVERAVFEMGQFDTQVLKAIEKGEPLPQGKDYQHGERYGYATLREAVFARDDYTCICCGKNSFKDKRILCVHHLGFRIGDRTNRLANLATVCTKCHTPKNHQPKGKLYNLKPELKDFKGATFMTMVRWDMLDKLKVVSKDIQVDVTYGAATKEARRDLKIKKSHANDAYCMGSFHPSHRTDLKRYEKCRRNNRVLSKFYDATYIDIRDGKKKKANALGCNRTKRRESRRSEKNERIYRGEKVSKGRIVLRTKRAVIRPGDIVYVGKKKYIVASSKNLGKQLKLADGSLLTTSKVTKIIHCGGWKTVTL

SEQ ID NO: 20402 - protein, 420 aa, unidentified; identical to SEQ ID NO: 2812

SEQ ID NO: 20403 - protein, 456 aa, unidentified
MSTCVCVLSNSGERLMPTFRLGKVRRLLKDGKAKIVKHHPFTIQLLYDSKTNTQPIEICEDVGYNYIGISVKSKSHEYVSAQYDTLQDEKEHHDDCRKYRRTRRNRLRYRKPRFDNRKRSEGWLAPSLEHKKQLNIRLIERYVSVIPITRATVEVGSFDTMLLQAIQKGESKPEGVDYQKGPRYNLATLREAVFYRDNYTCQVCGRKIADGAILHMHHMFYWKGRHSNSLDELLTVCEKCHTPANHQKSGKLYGFGEDVKFANLSGAAFMNTVRWQIVNELYAAFGKPFVTFTYGAMTKEKRIALHLEKSHNNDAYAMGDYHPAHRCEFGHYQKRCRNNRVLEKFYDATYIDTRTGNKAKGKELFNGRISRNHKKDSEDLHKYRSKKVSKGRRSIRRQRYAIQPYDTVRLESKTYITSGCHNKGTRLLIPANGKSKSVAISKVQVVCHAGAWIQII

SEQ ID NO: 20404 - protein, 429 aa, unidentified
MLWKFYRLIGRTSVRPISLAYRKKELFMRTVYVLDMNGKPLMPTCRFGKVRRMLKSGEVKVVDTLPFTVQLDRPTKTHVVQSVTLGCDPGRTNIGLAAVRSDGTDLYRSHCETRNKEIVDLMDARRAARRASRRGERLARKRLAAKHETATTFPNGRKLPGCKEPIMLKDIINTEARFNNRVRPAGWLTPTATQLLRTHLNLIKRISRILPVSDIALEINKFAFMQLDEPDKNKWNIDFQHGPLYGTGGLKAAVRQLQNDTCLLCQENVIEHFHHLVPRSKRGDNTINNIAGLCQKCHEAVHKSADTAEKLSTLKKGQTKHYGGTSVLNQIIPKLVEELGKTYHENLHLTYGGQMKEFRTKHKLEKTHDTDAYCIAAGTMQTVKPNIRTDVYEIKQFRRHNRANIYHQTERAYKLNGQTVTRNRRKRTD

SEQ ID NO: 20405 - protein, 423 aa, unidentified; identical to SEQ ID NO: 3951

SEQ ID NO: 20406 - protein, 455 aa, unidentified
MSVFVLDKQKRPLMPCSEKRARLLLQRGRALVHRRYPFTIRIKDRVGGETQPLRLGIDPGSRTTGLSLMRERAEDQRHVLCLFDLVHRGFQIREALDQRRAFRRRRRSQLRYRAPRFNNRTRREGWLAPSLQHRVDTLSAWVDRLCRLAPITSLSQELVRFDTQKLINPEISGVEYQQGTLLGYEVREYLLEKWGRECAYCGEKDTPLEIEHVVATSNGGSNRITNLTLACHACNQAKGNDALETFFARDQGLKRRLKKHTLSAQTRYQRVIREQKRPLRDASAVNATRWALFNTLKATGLAVSVGSGGLTKYNRQRLGIPKTHALDAACVGHFRTLHDGNCPTLVIKAMGRGSYQRTRLNRYGFPRGYLMREKRAKGFQTGDMVKAIVPGGKKAGTHTGRVAIRKTGSFNIQTQDGAVQGISYRHCTLVQRGDGYGYHQTITETHKGGAENAVA

SEQ ID NO: 20407 - protein, 493 aa, unidentified; identical to SEQ ID NO: 2644

SEQ ID NO: 20408 - protein, 450 aa, unidentified; identical to SEQ ID NO: 2935

SEQ ID NO: 20409 - protein, 423 aa, unidentified; identical to SEQ ID NO: 2301

SEQ ID NO: 20410 - protein, 413 aa, unidentified; identical to SEQ ID NO: 3220

SEQ ID NO: 20411 - protein, 554 aa, Streptomyces sp.; identical to SEQ ID NO: 3107

SEQ ID NO: 20412 - protein, 431 aa, unidentified
MPNKVYVINKHGRPLMPCSPAKARHLLDEGKAKVKKRTPFTIQLVYGSSGYTQEVILGVDAGSKTIGMSASTTKEELLSAEVKPRNDVVDLLSTRREFRRARRNRKTRYRKPRFDNRVRSKHKGWLAPSVEVKIQEHITAIRRVCGILPVSKVVVETAEFDLQLLKAIADGKPVPQGEDYQQGEMYGHYNVRQYVLWRDGYTCQCCGAHATKKKEVRLHVHHLESRKVGGDAPDNQVTLCESCHEKLHKGLIAEKDFKKRKRKSTRDATFMGIMRKTLMQRLCSELPIPVVKTRGYITKATREKLLVLPKSHTNDALAIAQGKQGFNVGYLPGIVQINKIYTIRPVRHHNRQLHKATILKGGIRKSNQTEKYVFGYCLFDKVQFNGQDCFIWGRRTTGIFTIKTINGKMIKDGISFKKLKLVEKSTSYLIA

SEQ ID NO: 20413 - protein, 494 aa, unidentified; identical to SEQ ID NO: 8423

SEQ ID NO: 20414 - protein, 442 aa, unidentified
MSTTVFVLDKKHRPLMPCRPARARRLLRVGRARVVKRFPFVIRLVDRTVEQSEVQPVLIKLDPGSRETGAAVVRDDEKKRHHALAFFVIKHRGGAIRDALKARSAFRRRRRSQNLRCRSPRFLNRVKPKGWLPPSLRHRVETTLSFVRRMCRYLPVSGIAAELVKFDSQKLQTPEVSGIEYQQGTLFEYEVREYLLEKFGRKCVYCGAEGVPLNIDHVVPRAKGGSNRVSNLVLACMSCNQKKGARSLEDFLKGKPKVLARVRRELKTPLRDAAAVNATRWVLFNELKATGLPVETGSGALTKLNRHAFGVEKEHWLDALCVGRLNGVVTRKGLNVLEIRCMGRGSRQRTRLTKYGFPRGYLMRQKCVHGFATGDMVEANVPKGKKAGLWRGRVAVRVSGSFNIQTPKGVIQGVGWKHCRLISHNDGYGYAWLGHAPHSSPA

SEQ ID NO: 20415 - protein, 423 aa, Arthrospira sp.; identical to SEQ ID NO: 3521

SEQ ID NO: 20416 - protein, 427 aa, unidentified
LRVFILNKRGKPLMPCSPAKARLLLKEKKAIVVRRTPFTIQLTIATGEAKQPVSLGVDAGYKHVGLSASTEKAELYASEVELRQDVSDLLSARRALRQSRRSRNTRYRAPRFDNRIRTKRKGWLAPTVENRINVHLSRIETVLRLLPVTKITVETASFDTQLLKNPDIAGKEYQEGEQLGFWNVREYVLFRDGHVCQHCHGRSKDPVLNVHHLESRRTGGDSPGNLITLCETCHKALHRGEIKLKAKRGRSFRAETFMGIMRWGVLNRLKASHPKLEVHNTYGYRTKHARIANGIAKSHCADAFCIAGNFGAKRLGEFFFQKQTRRNNRQIHKLSILKGGIRKRNQAPFEVKGFRLFDKVACQGEEGFIFGRRSTGYFDVRKLDGTCISAGISYKKLHLLEKRRTYLTEIRKEEALPPPPEGRGLRA

SEQ ID NO: 20417 - protein, 515 aa, unidentified
VAYMSTVYVLNKDGKPLMPTTRGGHVRHLLKEQKARVVRTKPFTIQLLYETDDVVQPLYLGIDPGRTNIGIAVVKTDGAAVFTAHLETRNKEIPKLMKKRKDSRRARRTNGRRCRRQRRAKANGTISKKCVKQTTAQNGSVSKRAKEIGVIKRHLPGCEKEVLCIGIKNKEAKFNNRTRPEGWLTPTANQLLQTHINLVKKIQKFLPISDVVLEVNKFAFMQLDNPNIQKWQYQQGPLYQKANLEEAVSEMQEHHCLFCKKPIDHYHHVVPQHKNGSNTISNIVGLCTKHHDLVHKEAVWQEKLAKKKTGLNKKYGALSALNQIIPALTKELSSLFPKHFFATNGKSTYDYRTAHGVSKDHWLYAYCIACSVLANDVCDSNINSHVPHELKQFRRHDRRALHKENMSRVYTLNGKKIATNRHKATEQTADSLEEFRQNHPDDVCKLKVKEHHPEYRNPKRNFPGCVFLVGKQAHVMQGISGSHNGKADGYYDTNGNSYPSSKCKFVAKNEGIVFA

SEQ ID NO: 20418 - protein, 412 aa, unidentified; identical to SEQ ID NO: 4932

SEQ ID NO: 20419 - protein, 431 aa, unidentified
VLVYVLDKNGQPLMPTHNGAKVRVLLKQKRVKVVSKCPFTIKLLYESTSFTQPLTLGVDTGSKYVGSAVINDVTAEILYESQLELRDDIKSKMDRRRQFRKARRNRLRYRPVRFNNRNASKRKNRYSPTLISKFQGHAREIKFVMFVLPISSIVLEVGEFDTQLLQDPTLAYHKWGYSRGELYQQENFKQAARARDGYKCQCCGKKNCRLEVHHLLPRNRGGSDKLANLITLCTDCHHLAHSSEEQLLAFQKKFGKKARGTLRYATQMNVLRHMLQRKYPEAELTYGFITKEMRRVFALEKSHMVDACCIAGRGVEFHTENSNRYKKKCVPKGDYARTGVFGGKFIVLPKGKIAGFKRYDKILYNNNEYFVAGRMSSGYIYLIDIDNNRVQVESTKRSTMEKYMSKAKIKVSLVKKISSTKTCICTCGQKY

SEQ ID NO: 20420 - protein, 470 aa, unidentified
MSVFVVGLNGCRLMPTSERKARLLLKQGKAFVEQKVPFTIRLNYKTGSTTQLGYLGIDTGSQHIGVSVVREDGTVLHKEEIGLRDSMSKRKLLEAKASLRRGRRYRKTRYRHPKWRPKTKRVYCEVPDRKGRHWQKKKITFTSKRPKGWLPPSLQSKTDHHIRWIKKLQDLLPEGYRLSIELGRFDPARMKNPEIHGDLYQKGPQYDYENVRAYVLDRDRYTCQICKKKGGKLHVHHILYRSHGATDDPQYMVTVCSDCHSAQNHLPGGILYQWMQEQKRFSRGLRDATFMNILRKRLIRAFPEAVFTYGNVTKVDREKLKLPKSHGNDATAIALVKTGITAVKDKESVICIQQVRRKKRSLHEETPRKGRKEPNRTAARNNKNTKAVTVTKRQNKKKVLMTGCLFDRVELNGKKGWISGFTGKSCYVKDADDQYLSTSPKYKQVSLSKLRILHHCGNWIIGAKKTLGKG

SEQ ID NO: 20421 - protein, 418 aa, unidentified; identical to SEQ ID NO: 5466

SEQ ID NO: 20422 - protein, 431 aa, unidentified; identical to SEQ ID NO: 2697

SEQ ID NO: 20423 - protein, 422 aa, unidentified
LNKRGKPLMPCSPAKARLLLKEKKAIVVRRTPFTIQLTIATGESKQPVSLGVDAGYKHVGLSASTEKAELYASEVELRQDITDLLSARRALRRARRNRKTRYRAPRFDNRIRTKRKGWLAPSVENRINAHLSRIEAVLRLLPITKITVETASFDMQRLKNPDISGKEYQEGEQLGFWNVREYVLFRDGHVCRHCHGRSKDPVLNVHHLESRRTGGDSPGNLITLCETCHEALHRGEIALKTKRGHSFRAEAFMGMMRWEVLNRLKASHSELEVNNTYGYRTKHARIVNGIDKSHCADAFCIAGNLGAERLCEFFFQKQTRRNNRQIHKLSILKGGIRKRNQAPFEIKGFRLFDKVACKGEESFIFGRRSSGSFDVRKLDGTRISAGISCKKLRLLEKRRTYLTEIRKEEALPPLPEGRGLRA

SEQ ID NO: 20424 - protein, 451 aa, unidentified; identical to SEQ ID NO: 10609

SEQ ID NO: 20425 - protein, 415 aa, unidentified
MVYVVANDGQPLMPTERHGKVCRMLKSGMAKVIKKCPFTIQLQYESKRNVQPVSLGVDAGSKHIGISATTKTKVLYESDVELRDDIVKLLATRRQLRRSRRNRKTRYRPARFDNRKRKEGWLAPSIRQKMESHLTVVANVCKILPVSRIIVETASFDIQKIKNPDIQGVEYQQGEQMDFWNIREYVFFRDGHTCQCCKGRSKDKILNVHHIESRKTGGNAPNNLITLCETCHKGYHNGTVILPKNIKRGMKFKDAAFMGIMRWAFYNALKEQYEPAIPVSMTYGYLTKNIRIRHNLPKEHHIDARCISGNPDAVSDGTYYYQKKVRCHNRQIHKQTILKGGIRKSNQAGYLVKGYRLFDKVRYHGREYFIFGRRKTGFFDIRTLSGEKVNKGSISVKKLTFADTRKNYLTERRTV

SEQ ID NO: 20426 - protein, 442 aa, unidentified; identical to SEQ ID NO: 2834

SEQ ID NO: 20427 - protein, 427 aa, Scytonema sp.; identical to SEQ ID NO: 8798

SEQ ID NO: 20428 - protein, 515 aa, unidentified
MTALEEKLSKTEYIYVLGFDGKPQMPTRRKRHVLKLLKTGRARIAEDIPFTIRLTYRNATVLQPVTLAEDPGRTNIGAAVLSPLGDLLFAAVIETRNKEIKKLMADRQKSRQASRRGERKARQRLAKRYGSMVKSGMVMRKLPMYAADKFVICKFIRNTQARFCNRKRCPDWITPTVQHLVQTHLNIIRKISRYLPVTDIAFEVNRFAFMHMENPEAMGVDFQNGPLKGYGDVKEAIRTQQHGKCLMCKKPITHFHHIVPRSRGGSDTIQNLAGLCTECHTKVHTDTAFRKDFDEKKSGQLKKYGALSALNQAVPFICKKLLEEYGEEHVYFCRGLDTSLIRTAFGFEKTKKNQMHEVDAYCIGLAALEVNEVETPAFDHTFQIRQFRRQDRSIIHHQTGRSYYQGKEKVAQNRKPGFEQKTTALSQWYKEQIRIHGEKEAEKLRSQLRVEKSCRHYNDMDRFLPGAVFLYEGKRYVLSGRITNGKYLRACGQGMKNFPAAECTFIRHNAGLVFI

SEQ ID NO: 20429 - protein, 456 aa, Lactobacillus sp.; identical to SEQ ID NO: 5354

SEQ ID NO: 20430 - protein, 416 aa, unidentified
MVYVLDKNGQPLMPTDRHRKVRLMLQSGQAKVIKRCPFTIQLNYDSGHQTQEISLGIDAGSKHIGVSTTTKIKVLYEVDVELRNDIVDLLSSRRELRRGRRNRKTRYRQAKFNNRRRGNGWLAPSIRQKIGTHLTVVENICKMLPISRIMVETASFDIQKIKNPDIQGAEYQQGDQLGFWNIREYVLFRDNHTCQCCKGKSKDKILNVHHIESRKTGGNAPNNLITLCEICHTGYHKGAVQLPKTVKRGMRFKDAAFMGIMRWAFYEALKQQYEPVGTPVHNTYGYITKHTRIEHNLPKEHYVDARCISGNPDAFPSGEYYYQKKVRCHNRQIHKLTILKGGIRKQNQATYLVKGYRLFDKVSYQGKGYFVFGRRQSGFFDIRTLSGEKVNKGSLSCKKLKFIATRTYYLTERRAV

SEQ ID NO: 20431 - protein, 431 aa, unidentified
MPNKVYVINKHGRPLMPCSPAKARHLLDDKKAKVVKRMPFTIRLLYGSTKYIQPIILGVDAGSKTIGLSASTAKGEVFAAEVMPRNDVVENLSTRREFRRARRNRTTRYRKPRSDNRVRSNHERWLAPSVKVKIQEHITSIKRVCTILPISKVVIETAEFDLQLLKAIQEGKPIPEGEDYQKGEMYGSYNVCQYVLWRDNYTCICCGVRGTPKNPVRLHVHHFESRKYGGNAPDNHGTLCDDCHKKFHLGIIADVKLKTRRRQSTRDAAFMGIMRKTLMWRLRTELFIPVAETKGYITKATREKLLVLPKSHTRDALAIAQGRHGFSIKEYAYVEPANHIYTVRPVRHHNRQLHKASILKGGIRKRNQASKYVFGFRLYDKVLYQGKACFVWGRRTSGTFLLRTIDGIKVKDGVSYRNLTLLERSSNYLIA

SEQ ID NO: 20432 - protein, 423 aa, Moorena sp.
MRVFVLNKNRQPLDPCRPARARILLSTGKAKVYRRYPFTIILTEEIIDPVTHDHRIKIDPGAKTSGFAIFQGERVVWGAELIHRGFQIRDSLTSRRQLRRSRRNRKTRYRKPRFLNRTRPKGWLAPSLMSRVQNIETWTKKLIKLCPVAGISQELVKFDTQKLENPEISGIEYQQGTLYGYELREYLLEKWNRKCAYCGTTGTQLEIEHIKPKSKGGSDRVSNLAIACHPCNQAKSNQDIELFLSNKPSILKRILSKAKRPLADAACVNSTRWKLYHDLKSTGLPVEVGSGGLTKFNRCRQNLPKTHWLDAANVGKVETLIIEVTNPLIITAKGHGTRQICRTNKYGFPTRHCSRIKFHKGFQTGDIVRAVVTKGKKIGTYVGRVATRKSGSFNISTKSGLVEGISHKYCQFIHRKDGYAYTT

SEQ ID NO: 20433 - protein, 518 aa, unidentified
MANLKLIDELLEKTEYIYVLGIDGKPQMPTNRKVRVRKLFKLGMAKIVDTVPFTMRLLYKNEPVLQPITIAEDPGRTNIGTAVLTQLGDLVFSAVVETRNKSIKKLMADRKAHRQASRRGERKARQRLAKRHGSMIKAGMIMRKLPQYAADKFVTCKIIKNTEARFCNRKRMPDWLTPTVNHLVQTHINLIKKIEKYLPITDVAIEVNRFAFMQMENPNISGVNFQNGPLKGFDDVKAAIREQQHGKCLMCKNDIEHFHHIIPRSKGGSDTIQNQAGLCKKCHTKIHADVEFQAKLKDKKNGLIKKYGALSALNQAVPFICKELIKIYGAEHVHFCTGKDTSLIRSSLGYEKTKDNQMHEVDAYCICLAAIGADKAKRPNFNNVFKIKQFRRQDRSIVNYQRERTYYLEGKKIATNRKPRFEQKGDALSGWYSEQVKLKDKKYADKLTGRITVKKSTRGYNSKNRVMPGTVFYYNGKRLVLTGQLTGGKYYRTYGDTKINYPVNKCQIYKHNEGLVFV

SEQ ID NO: 20434 - protein, 406 aa, unidentified; identical to SEQ ID NO: 13187

SEQ ID NO: 20435 - protein, 406 aa, unidentified; identical to SEQ ID NO: 16733

SEQ ID NO: 20436 - protein, 483 aa, unidentified
LPITLAKRTTFIENPYGTATSSGMERVSELIGNTKRKGLLMVAVVDLFGKPLMPTNEYRARKLLKRKKAKIFCYRPFTIQLTEQKSIEVQPIELCMDTGYIHIGISAKSERHEYLGMQIDTLTDEKLKRDDKRQYRRQRRNRKRYRAPRFDNRRRKEGWIAPSLEHKKEIHIDAIQRICKVMPITDITLEMGNFDTQVLKAVEEGKPLPQGSDYQHGERYGIATLREAVFLRDGYKCQCCEKTVKDGAILHVHHIKYRSQGGTNRMSNLITVCDKCHTQKNHKPGGKLWNWKPKLAEFKGASYMTSIRWMLYNEVTALLTNRSIHITYGAKTKESRRELDIEKSHVNDAYVMGLFHPKHRTQPVYFKKKRRNNRVLERFYDAKYIDSRDGKKQSGQELFNGRISRNHRKDSENLHLYRKQKVTKGKRSIRNKHYPIQPHDILLYQKKKYETAGCHNNGTRAILLPEKKSVALRQLTMYQYAGG

SEQ ID NO: 20437 - protein, 466 aa, unidentified
MSTCACVFSKSGKRLMPTIRLGKVRHLLKDGKAEIIKHHPFTIQLLYDSETNIQPIEICEDVGYNYIGISVKSQSHEYVSVQYDTLQDEKDCHDSCRKMRRIRRNRLRCRKPRFDNRKRNKDWLAPSLEHKKELNVNVIKMYCEVVPITHVTVEVGSFDTMLVKAIQEGKAIPEGADYQKGPRYNLATLREAVFYRDNYTCKVCGRKAKNDSAILHVHHMFYWKGRHGNSLNELLTVCEKCHTPANHQKGSKLYGFGENIKFANLSGAAFMNTVRWQIVNELYATFGKLFVTFTYGAMTKEKRIALHLEKSHNNDAYAMGNFHPVDRCAFEHYKKVKRNNRILEKFHDSQYIDIRTGKVANGRSLFNGRINRSHKKDSENLHKYRGKRTRKGYRALRRKKVALNPGDLVSLNGEILVVHSTHAGKNGYVGVEFKTPSKSGKKSVSLKKLKIVKTSNSMHSAWTKVS

SEQ ID NO: 20438 - protein, 440 aa, unidentified; identical to SEQ ID NO: 3187

SEQ ID NO: 20439 - protein, 536 aa, unidentified; identical to SEQ ID NO: 6224

SEQ ID NO: 20440 - protein, 370 aa, unidentified
LSKVKTMRVFVFNMRGRPLMPCSQRKARLLLRENKAKIYKYHPFTIQLTYTTGETKQDCHIGIDTGSKYIGAAVRSEDKVFWKGEIELRQDIRSNLDTKRIYRRSRRNRKTRYRKPRFLNRKRRDEWLPPSLQSRINHTFHWIDTLSSLVPNPILHIEVGKFDVAKMINPEIHGVDYQHGQTYGFFDERYFVFARDNYTCQCCGKSKNKILNTHHIIYRSNGGTNRVDNLITVCTDCHTSQNHRKGGIFYQWQEQHKKVKQYKEPPFMNTLRKRIFVAYPDAEITYGSETTPKRKAMKLDKTHYNDAIVISGINEIKENPEEWLLIKQFRKKKRSLHEATARKGRKKPNRNQTRNSKNTPYYKGFYLNDK

SEQ ID NO: 20441 - protein, 413 aa, unidentified; identical to SEQ ID NO: 3587

SEQ ID NO: 20442 - protein, 407 aa, unidentified
  VARIANT 407: note = X can be any naturally occurring amino acid
LSNVFVLDTNKQALNPVHPGRARRLLSSGQAAVFKKYPFTIILKCAASSPHVWPLRVKLDPGSKTTGLAIVNDASGEVVFAASLIHRGHAIRERLEKRRAARRSRRQRKSRYRQSRFDNRGTKKKGWIAPSVQSRVCNVITWVKRLVRLCPITAISQELVKFDLQQMDHPEISGVNYQQGTLSGYEVREYLLDKWGRQCAYCGAKDVPLEVEHINPRSKSGDDRVCNLTLACEPCNTKKGTQDIRVFLAHQPELLAKLLAQAKSPLKDAAAVNITRWVLHAQLKAFGLPLECGSGGRTKFNRITRGLEKTHWCDAACVGASTPAEAEEVQARLSHRGSGESGSSSSLQACRHACWKDVSQSEWGIHDCHGRRDGHGYWQEVLPHAATSRRLWVHTERRGGVSSRPIX

SEQ ID NO: 20443 - protein, 427 aa, unidentified; identical to SEQ ID NO: 9869

SEQ ID NO: 20444 - protein, 439 aa, unidentified
MSVFVLDKHGKPLMPCSEKRARLLLSRHRARVHRLVPFVIRLTDIRLQDVALQPLQVKLDPGSKTTGVAVVRVAEPVDIGRSVSVLFLMELIHRGRQISESLTARRAMRRRRRGQLRYRAPRFNNRTKPKGWLAPSLRHRVETTINWVARLRRWAPVTGLVSELVRFDMQVMENPDISGVEYQQGTLFGYEVREYLLEKWGRSCAYCSKKEVPLQIEHVVPKARGGSNRISNLTLACGPCNTKKGARSIEEFVKDSATLKRILAKLKAPLRDAAAVNSTRWVLLNELKKTGLPVESASGGRTKFNRSQLGIPKTHALDAVCVGKIDAVIDWRRPTLTVTCMGRGTYQRAKLNKFGFPRGYSIREKRIKGFQTGDIVLAMVPASSKKAGQYIGRVAIRKTGSFNIQAGGNVIEGISHKYCQLIQRGDGYRYHQSQTKIAN

SEQ ID NO: 20445 - protein, 443 aa, unidentified; identical to SEQ ID NO: 16421

SEQ ID NO: 20446 - protein, 390 aa, unidentified; identical to SEQ ID NO: 4490

SEQ ID NO: 20447 - protein, 512 aa, unidentified
MSTIYVLNKDGKPLMPTTRGGHVRHLLKEQKARVVRTKPFTIQLLYETDDVVQPLYLGIDPGRTNIGVAVVKADGTAVFTAHLETRNKEIPKLMKKRKDSRRARRTNGRRCRRQRRAKANDTLSTKRVKQTTAQNGSASKRAKEIGVIRRRLPGCEKDVLCIGIKNKEAKFNNRTRPEGWLTPTANQLLQTHINLVKKIQKFLPISDVVLETNKFAFMQLDNPNIQKWQYQQGPLYKKESLESAVSEMQEHHCLFCKKQIDHFHHVVPQHKNGSNTIGNIVGLCARHHDLVHKETAWQEKLAKKKTGLNKKYGALGVLNQIIPALTKELGVLFPKHFFVTTGKSTYDYRAAHGVCKDHWLDACCIACSVLPNDVCDSSINNRVPYELKQFRRHDRRALNNENMSRVYTLNDNVVATNRHKATEQESASLEEFRKEHPDDVCKLKVKEHHPTYRNMNRNYPGSVFFVDKQVHVMQGIARSKDGKATTYKDTNANLITAEGCKFVAKNSGILFV

SEQ ID NO: 20448 - protein, 512 aa, unidentified; identical to SEQ ID NO: 4049

SEQ ID NO: 20449 - protein, 417 aa, unidentified
MPCSPAKARLLLKEKKAIVKRRTPFTIQLTIATGEARQPVTLGVDSGYKHIGLSATTEKAELYASEVELRQDITDLLSARLALRRSRRSRKTRYRAPRFDNRVASKRKGWLAPSVENRIAAHMSRVEAVMRVLPVTAITVETAAFDTQLLKNPDIAGEAYQQGEQLGFWNVREYVLFRDGHVCQHCRGKYKDPILNVHHIESRRTGGDAPNNLITLCETCHKAFHRGEIKLKVKRGKSFKAETFMGIMRWTLFERLKKAHPELRVRNTYGYLTKHKRISHGIAKSHCADAYCIADNLGAKRLEGFFFQKQTRKHNRQIHKLSILKGGLRKKNQAPYEVKGFRLFDKVICKGEEAFIFGRRTSGSFDVRRLDGTRISAGISCKKLRLLEPRTTYLTEFRKEAALPHLHECRGFRAEFL

SEQ ID NO: 20450 - protein, 456 aa, Halomonas sp.; identical to SEQ ID NO: 6593

SEQ ID NO: 20451 - protein, 443 aa, Anoxybacillus sp.; identical to SEQ ID NO: 13210

SEQ ID NO: 20452 - protein, 424 aa, unidentified; identical to SEQ ID NO: 3434

SEQ ID NO: 20453 - protein, 414 aa, unidentified; identical to SEQ ID NO: 4779

SEQ ID NO: 20454 - protein, 414 aa, unidentified; identical to SEQ ID NO: 4015

SEQ ID NO: 20455 - protein, 536 aa, unidentified
LTFVSIYVQRVYGRTRRFFQSAALHSGRQARGNIYPAGQTAGVLQKEVRTMAAVYVISASGKPLMPTTRCGHIRGLLNAGKARVVEREPFTIQLKYETPDVTQPLYLGIDPGRTNVGSAVVREDGECVFTAQLTTRNKDVPKLMKARKQFRMAHRRLKRRCKRQRRAKAAETLSQKGEFQRLLPGYEESILCKGIRNKEARFNNRQRPAGWLTPTANHLLLTHLNMVKKLQKLLPITDVVLEVNRFAFMAMENPSIRRWQYQQGPLYGKGSVEDAVYAQQDGHCLFCGKPIAHYHHVVPQHKNGSETLENRVGLCNEHHDLVHKDRAWDAKMKETKAGLNKKYHALSVLNQIIPALTEQLTAMFPQHAFVTTGKDTADFREDYGIAKEHHLDAYCIACSVLAEPTKVAAPTGKPHRLMQFRRHDRQVCHKENIKRVYLSEGKAVATNRHKAIEQKDDSLEEFRKTHTQQEVSALTVKDHQPVYKDMRRFMPGGVFLFNGKVHTLQRSHGRYKGMPFYYIDTDGSKNHAKGCIFLQQ

SEQ ID NO: 20456 - protein, 424 aa, unidentified; identical to SEQ ID NO: 3434

SEQ ID NO: 20457 - protein, 442 aa, unidentified
MVTVQQSTHHLPFGRVFIRRNLFMVYVISQDGKPLMPCSDPIARLLLKQGKAKVKKRDPFTIKLTYETTNYTQGLTLGVDTGSGTIGTAVSKDNGDIVYMSEVVVRNDITDKMTQRAKYRRNRRNRKTRYRKARWLNRASSIKKARFSPTMQSKLHSHVREIEYIQSILPVTEMVFETGQFDMQLMKNPSLANPKVRPWGYQKGANYGFENTKAMVLNRDNYTCQCCKGKHKDSKLEVHHIVFRSQGGSDEESNLLTLCHTCHKDLHSGKINPKLSGKVKGNLKYATQMNSIRKQLFRFYPNAIETFGYVTKANRLHLGVDKEHYYDACTIATQGNAFNVKSNLYKKKCVSDGDFQKTKGIRSEQPIVTDKICGFRKFDKVRYFGNDYFIKGRMSTGYAILMDIDGNKIDFSTMPRGYKTPKLSNCKRITARSTVMTQVKVV

SEQ ID NO: 20458 - protein, 470 aa, unidentified; identical to SEQ ID NO: 2825

SEQ ID NO: 20459 - protein, 470 aa, unidentified; identical to SEQ ID NO: 2825

SEQ ID NO: 20460 - protein, 417 aa, unidentified
MFVYVISKDGQPLMPTTRFGKVRRLLRDKKAKVIRSCPFTIKLLYEPESLVVQGVVLGQDTGSKYIGTACVVGDRVIYQSEIALRDDIKKKMDDRRASRTSRRYRKTRYRKPRFLNRANSTKKDRLSPSVKSKVQSHIDEIEFCKKILPISKIVLEVSQFDTHLMKNPSLIFEKVKHWGYQEGFNYGYSSRREAVLHRDNYTCQCCGKKHVRLEVHHIIFRCMGGTDDEKNLITLCEKCHKLIHDGVLILTKKPRKLNLKYATQMSIIRSQLLKIYPDAIETFGFVTKENRNNLNLSKGHFIDACVIASGGKKFKQLNWLFKKKRVAKQNRKLCNGVRGEKKLPTGKILGFKKFDKVKYLGEICFIKGRRTSGGFVLMDIDNNAIDFRDRGGRQNPSYKLLERLNTRKSILCISQNF

SEQ ID NO: 20461 - protein, 439 aa, unidentified
MVFVLDRSKKPLDMISHAKARILLKNRLAVVHKVYPFTIRLKDNSCVSNNRTYTVKLDPGSRTTGVAIVDDKNQVVMLAEIEHRGHLIKKDLDSRRAVRRSRRSRKTRYRPARFLNRTRPKGWLAPSVKSRADNVINFIKKYKKLININKIMIENVSFDTAQMSSDTKLWGNDYQQGNLYNKNLREFVFSKTKGRCSYCEEKATEIDHIIPRSNGGTNSSYNLTPACRPCNEKKSNLSLKEFGKLMNKDYSQLEPKKLSKDAAIVQSARNYMIKEITKLVSNTTSYDAWLTKYNRDRLDLSKQHYYDALSVGNIENFRFLTDKVLQISAKGRGSRQMCRMDKFGFPRTKPKGSKLVKGFQTGDMVKAIVPKGLKKGEYLGKVAVRFSGYFNIQTKTQVIQDIGYKYCRLIQRSDGYSYNYKECDSLSAIHNRVSIADFR

SEQ ID NO: 20462 - protein, 420 aa, unidentified
MVYILNKHNEPMMPCSERKARLLLKQGRAVIYRKDVFTIKLINGSYGYKQHITMGIDCGSKHIGISATTNKKELFSANAELRNDIVKLLSDRKSLRRNRRYRKTRYRKPRFDNRRIKEGWLAPSIRQKIDSHVRIVSLIHKLLPVKQVNVEVAAFDIQKIKNPYIKSSEYQMGEQLDSYNVREYVLFRDNHICQHCKGKSKDDVLQVHHIESRKTGGNAPNNLVTLCKTCHEKYHSGEITLNVNRGKSFRDASVMSTMRWFLYEELKSRFSNVNITYGYITKYKRIKLGLSKEHYNDAYCITGNLNTSRLCNHHLIRFIPRHSRILHVQTFSKGGNRRSASAPYWLNGGKPSKVGIKFTMFDKVKFNSVVCFISGSSNGFASLRDINWNKVHGCKTTVTVNKLALVSRRRGSMLFGELCG

SEQ ID NO: 20463 - protein, 427 aa, Nostoc sp.
MSKVFVLDTEKRPLDPIHPAQARQLLGNKKAAVFRRFPFTIILKESRADASVSDLRIKLDPGAKITGIALVNDSTGEVVFAADLKHRGFAIRDALISRRQLRRSRRNRKTRYRKPRFLNRIRPEGWLAPSLMSRVHNVETWVNRLRKFAPITAISTELVKFDMQLMRNPKIEGKEYQQGTLAGYETREFLLEKWNRQCAYCGIKDIPLQIEHIHPRSKGGSNSITNLTLSCEKCNVKKGTKDIKDFLKKDPTRLQKILVQAKKPLADAAAVNATRYKLLEVLKSTDLPVECGSGGLTKFNRTNQQLQKTHWLDAACVGQSTPILIIKGIKPLLITANGHGTRQMCRTDKFGFPNRYVPKLKFIKGFQTGDIVKAVVTNGKKIGEYIGRVAVRSTGSFNISAQRGLIQGINYKFCKSIHKKDGYSYSS

SEQ ID NO: 20464 - protein, 515 aa, unidentified
MTALEEKLSKTEYIYVLGFDGKPQMPTRRKRHVLKLLKTGRARIAEDIPFTIRLTYRNSPVLQPVTLAEDPGRTNIGAAVLSPLGGLLFAAVIETRNKEIKKLMADRQKSRQASRRGERKARQRLAKRYGSMVKSGMVMRKLPMYAADKFVTCKFIRNTQARFCNRKRCPDWITPTVQHLVQTHLNIIRKISRYLPVTDIAFEVNRFAFMHMENPKAMGVDFQNGPLKGYDDVKEAICTQQHGKCLMCKKPISHFHHIVPRSRGGSDTIQNLAGLCPECHTKVHTDTTFRKDFDRKKSGQLKKYGALSALNQAVPFICKKLLEEYGEEHVHFCGGLDTSLIRTALGFEKTKKNQMHEVDAYCIGLAALEVNEVETPAFDHTFQIRQFRRQDRSIIHHQTGRSYYQGKEKVAQNRKPGFEQKTTALSQWYEEQVRIHGEKEAEKLRSQLRVEKSCRHYNDMDRFLPGAVFLYEGKRYVLSGRITNGKYLRACGQGMKNFPAAECTFIRHNAGLVFI

SEQ ID NO: 20465 - protein, 427 aa, unidentified
MSNYAFVLDSHKKPLQPCHPSVARKLLTNGRSAVFRRYPFTIILKEEKTNIGNHPIELKIDPGSKTTGIALVCNSKVIWGTELTHRGFQIKDKLQSRANCRRGRRNRNTRYRKPRFLDPSRAQDTRTKGWLAPSLQHRVLTTLTWVKRLCKYAPIKSFAQELVRFDTQKIANPEITGTEYQQGTLLGYEVREYLLEKWGRSCTYCSKENTPLEVEHIVPRASRGSNRISNLCLACHSCNTRKGVRSIEDFLKKKPELLDRIKKQAKAPLRDAAAVNSTRCALYHQLKITGLPITVASGGKTKYNRIRLGLPKTHWLDAACVGEVVSLKVLTKKPLLIKARGQGGRQKCAVNKYGYPTRHNPLKPIMGWQTGDIARFNGVIGRLTTRSNGRFYITTTSKRVVNIRPKELDLIKAINRKDGYEYGLTNL

SEQ ID NO: 20466 - protein, 451 aa, unidentified
VLHARNLSITLAKVSYGLYDAGLPQKIIQKERSTYMVYVLSQNGQPLMPTIRHGKVRRLLKEGKANVVKKCPFTIRLTYPSGDQTQEISLGIDSGSKYIGISATTQKKVLYEAEVELRNDISKLLAARRQNRRSRRSRKTRYRKPRFDNRKRKEGWLAPSVQQKVDCHLKVVEDVCKLLPVTRIIAEVASFDIQKIKDPKIHGTDYQQGDQLGFWNVREYVLFRDGHTCQCCKGKSKDKILNVHHIESRQTGGNAPNNLITLCETCHKGYHKGQVKLPKKIKRGMTFKDAAFMGIMRWAFYDRLKEIYLPLGIDVSLTYGYLTKNTRIAHQLPKTHYLDARCISGHPDAISDGIYYHQKKIRCHNRQLHKANTLKGGIRKRNQAEYLVHGFRLFDKVRYQGKDYFIFGRRKSGYFDIRDLNGEKINKGSISYKKLRLVETRRSYLTERRLA

SEQ ID NO: 20467 - protein, 512 aa, unidentified
MSTVYVLNKDGKPLMPTTRGGHVRHLLKEQKARVVRAKPFTIQLLYETNDVVQPLYLGIDPGRTNIGVAVVKANGTAVFTAHLETRNKEIPKLMQDRKKARRARRTNGRRCRRQRRAKANGTISKKCVKQTTAQNGSVSKRAKDIGVIKRRLPGCEKDVLCIGIKNKETKFTNRTRPEGWLTPTANQLLQTHINLVKKIQKFLPISDVVLEVNKFAFMRLNNPNIQKWQYQQGPLYKKESLESAVSEMQEHHCLFCKKPIDHYHHVVPQHKNGSNTIGNIVGLCAKHHDLVHKDSAWEKKLAKKSTGLYKKYGALGVLNQIIPTLTNELSSLFPKHSFVTNGKSTYDYRAAHGVSKDHWLDAYCIACSVLPSNVCDSNINNHMPYVLKQFRRHDRRVLNNENMNRVYTLNNKAVAINRHKAKDQKTVSLEEFRKEHPDDVCKLKVKEHHPTYRNMNRNFPGSVFLVGKQIHVMQGIASSKDGKATKYNDTSATAIAAGKCKFVAKNTGILFV

SEQ ID NO: 20468 - protein, 321 aa, unidentified
MSTVYVLNKNGKPLMPTTRCGHVRRLLKEQKARAVASKPFTIQLLYETDDVVQPLYLGIDPGRTNIGVAVVKTDGTAVFTAHLETRNKEIPKLMKKRKDSRRARRTNGRRCRRQRRAKANGTLSKKCVKQTTAQNGSVSKRAKKIGVIKRHLPGCEKEALCIGIKNKEAKFNNRTRPEGWLTPTANQLLQTHINLVKKIQKFLPISDVVLEVNKFAFMRLDNPNIQKWQYQQGPLYQKASLEEAVSEMQEHHCLFCKNTIDHYHHVVPQHKNGSNTIDNIVGLCTKHHDLVHKETAWQEKLAKKKTGLNKKYGALSVSLQV

SEQ ID NO: 20469 - protein, 450 aa, unidentified; identical to SEQ ID NO: 2935

SEQ ID NO: 20470 - protein, 414 aa, unidentified
MPCSPAKARLLLKEKKAIVVRRTPFTIQLTIATGETKQPVSLGVDAGYKHVGLSASTEKAELYASEVELRQDITDLLSARRALRQSRRNRKTRYRAPRFDNRIRTKRKGWLAPSVENRINAHLSRIEAVLRLLPVTKITVETASFDLQLLKNPDISGKEYQEGEQLGFWNIREYVLCRDGHVCQHCYGRSKDPVLNVHHLESRRTGGDSPGNLITLCETCHKALHRGELTLKAKRGQSFRAEAFMGIMRWEVLNRLKASHPELEVNNTYGYRTKHARISNGIAKSHCADAFCIAGNLGAKRLGEFFFQKQTRRNNRQIHKLSVLKHGLRKRNQVPFEVNGFRLFDKVACKGEEGFIFGRRSSGYFDVRKLDGTRISAGISYKKLHLLEKRQTYITEIRKEEALPPLPEGRGLRA

SEQ ID NO: 20471 - protein, 424 aa, Anabaena sp.; identical to SEQ ID NO: 9570

SEQ ID NO: 20472 - protein, 502 aa, unidentified; identical to SEQ ID NO: 16429

SEQ ID NO: 20473 - protein, 483 aa, unidentified
  REGION 1..483: note = IscB polypeptide
MDNIVKANITPEMGDDPYGSLGNYMVFVISSDKKPLDPCNPARARKLLNQGKASVFKQYPFTIILKSRWSFVSKTSDYRLKIDPGSKVAGFAIVSAVSNKVIWSAEIQHRGSIIKRLLEARRGIRRSRRNRKTRYRKARFMNRRRQGQFSPNISIDEVKQIKGKGWLPPSLCSRMYNVETWVRRLVKLCPIKTISYELTKFDTQRMQNPDISGIKYQQGELAGYDVREYLLEKYERKCVYCGAKDVPLEVEHVIPKDKDGSDRVSNLVISCRKCNMRKANKSIEEFLKSKPEQLAKIKRQLKEPLKDTASMNATRWALFNNLKALGFPIEIGTGATTKYNRSKLDLPKEHWIDAACVGLSTPDNLDVGNIKPLYIKAVGYGSRQMCDVYGSSCHGQKSESGKVKMPGYPRSKAKSLKCYGGIQTGDIVKAIVLSGKEKGTHIGKVAIRSTGDFHVINKTGDHDHIHRRFCELIQHADGYSYNY

SEQ ID NO: 20474 - protein, 372 aa, unidentified; identical to SEQ ID NO: 9123

SEQ ID NO: 20475 - protein, 420 aa, unidentified; identical to SEQ ID NO: 15458

SEQ ID NO: 20476 - protein, 425 aa, unidentified; identical to SEQ ID NO: 3148

SEQ ID NO: 20477 - protein, 428 aa, unidentified; identical to SEQ ID NO: 7211

SEQ ID NO: 20478 - protein, 456 aa, unidentified; identical to SEQ ID NO: 9034

SEQ ID NO: 20479 - protein, 408 aa, Beggiatoa sp.; identical to SEQ ID NO: 14362

SEQ ID NO: 20480 - protein, 457 aa, unidentified
VWLYQAVYNHGEGFLPSSEERTAFYWLLIYRKEHGIMQYVYVLNKHGEPLMPCSPGKARLLLKQQKACVVKRTPFTIKLLYGSAGYKQPITLGVDAGSKHVGLSASTEKRELYCEEFTPRNDVVDLLSTRKQNRRSRRNRKTRYRAPRFDNRVHSKRKGWLAPSVEVKIQEHITVIKRIRRILPITLVRVETAEFDTQRLKAMLKGKPLPVGTDYQLGEMYDEYNVRQYVLKRDNYTCQCCGAHPTEKKPVRLHVHHLESRHVGGNAPNNLITLCVACHKALHEGKITLDKGKKRGKPLRDAAFMGIMRNTLLARLKDELNIPVKQTYGYITKLLREKNKIPKSHVNDARCIAKAPNAKPCDTMLYTRALRHHNRQIHKAKILNGGIRKKNQAPYLVKGFRLWDKVRYNGEECFITGRRSSGYFALKKYDGTVISNSASYKKLMLLEAATNYITERS

SEQ ID NO: 20481 - protein, 464 aa, unidentified; identical to SEQ ID NO: 6627

SEQ ID NO: 20482 - protein, 390 aa, unidentified; identical to SEQ ID NO: 4490

SEQ ID NO: 20483 - protein, 483 aa, unidentified
MKVYVIGLNGIGLAPTTPRKARLLLKNGRAKIAFRQPFTIQLTYKTGCTHPKEMVIGIDTGSQHIGAGIISKETEQVVSKEEYELRSSMEKRSLLETRKAYRRGRRYRKVRYRHPKFKPATRRVYVEKPITQNKHQTHWKKQTNTFDSARPEGWLPPSIQSKLDHHIRIISRYQNALPKDAQLRIEVGRFDVQHMENPQIRGEMYQKGAMYEYENKKAFVFSRDGYTCKCCKCKAGSKRKDGTTVKLVVHHVDFRSQGASDNPNRLVTVCDRCHTTAAHKPGGILYDWMLKEKKFTRGYRDTSIMNILRRRLWQAFPDAAFTYGNITAADRKILHIDKTHGNDAVAITAHGMDRITDIPNTTYYRQMRKQKRSLHEATPRKGRKEPNRTAKRNAKNTCVVKGIYLNDKVKAFGQTGWVTGFSGTSSVYIKNREGEYITVPGKNHKMVPLAELSVRTHCNNWAVSDIKTISNRRQENCDAEMCM

SEQ ID NO: 20484 - protein, 470 aa, unidentified; identical to SEQ ID NO: 2825

SEQ ID NO: 20485 - protein, 424 aa, unidentified; identical to SEQ ID NO: 11636

SEQ ID NO: 20486 - protein, 360 aa, unidentified
LSKVKTMRVFVFNMRGRPLMPCSQRKARLLLRENKAMIYKYHPFTIQLTYTTGETKQDCHIGIDTGSKYIGAAVRSEDKVFWKGEIELRQDIRSNLDTKRIYRRSRRNRKTRYRKPRFLNRKRRDEWLPPSLQSRINHTFHWIDTLSSLVPNPILHIEVGKFDVAKMINPEIHGVDYQHGQTYGFFDERYFVFARDNYTCQCCGKSKNKILNTHHIIYRSNGGTNRVDNLITVCTDCHTSQNHRKGGIFYQWQEQHKKVKQYKEPPFMNTLRKRIFVAYPDAEITYGSETTPKRKAMKLDKTHYNDAIVISGINEIKENPEEWLLIKQFRKKKRSLHEATARKGRKKPNRNQTRNSKNTP

SEQ ID NO: 20487 - protein, 460 aa, unidentified
MVAVVDLFGKPLMPTNEYRARKLLKRKKAKIFGYRPFTIQLTERKDTEIQPIELCMDTGYIHIGISAKSERHEYLGMQIDTLTDEKLKHDDKRQYRRQRRNRKRYRAPRFDNRRRKEGWIAPSLEHKKEIHIDAIQRICKVMPITDLTLEMGNFDTQVLKAVEEGKTLPQGSDYQHGERYGIATLREAVFLRDGYKCQCCEKTVKDGAILHVHHIKYRSQGGTNRMSNLITVCDKCHTPQNHKPGGKLWNWKTKLAEFKGASYMTSIRWMLYNEVTALLPNSSVHITYGAKTKESRRELDIEKSHVNDAYVMGLFHPKHRTQPVYFKKKRRNNRVLEKFYDAKYIDGRDGKKRSGQELFNGRISRNHKKDSENLHLYRKQKVTKGKRSIRNRHYPIQPHDILLYQKNKYETAGCHNNGTRAILLPEKKSVALRQLTIYQYAGGYYRVPYESNKKEERTGS

SEQ ID NO: 20488 - protein, 431 aa, unidentified
MSYVFVIDQEKRPLDPVHPGRARKLLSSGKAAVYRRFPFVLILKHPVSEAHPQPLRLKIDPGSKTTGLAVLNDTSGQVLWAAELVHRGEEVHQALQKRAGVRRGRRSRHTRYRAARFSNRRRKRGWLAPSLCSRMQNVQTWTRRLMRWCPLGAISYEAVRFDTQAIQNPEIKGVAYQHGTLAGLEVKEYLLLKWRHKCVYCQKGDIPLEVEHIVPKRRGGSDRITNLTLACEACNQQKGSQTAQAFGFPHLQAQALQPLKDAAAVNSTRWALYERLKATGLPIEVSTGGQTKWNRKQRGIPKSHWLDAVCVGPSTPERVQWQHVIPLLITARGRQCRQLCNVDGWGFPRSRPKGPSKVFGFQTGDMVQAVVTRGKRMGTYVGRVAIKTDGYFKITGTHGIVEGIHARYCSPLHRVDGYEYQKGSAALPPQM

SEQ ID NO: 20489 - protein, 405 aa, unidentified
VSVVREDGTVLHKEEIGLRDSMSKRKLLEAKASLRRGRRYRKTRYRHPKWRPKTKRVYCEVPDRKGRHWQKKKITFTSKRPKGWLPPSLQSKTDHHIRWIKKLQDLLPEGYRLSIELGRFDPARMKNPEIHGDLYQKGPQYDYENVRAYVLDRDRYTCQICKKKGGKLHVHHILYRSHGATDDPQYMVTVCSDCHSAQNHLPGGILYQWMQEQKRFSRGLRDATFMNILRKRLIRAFPEAVFTYGNVTKVDREKLKLPKSHGNDATAIALVKTGITAVKDKESVICIQQVRRKKRSLHEETPRKGRKEPNRTAARNNKNTKAVTVTKRQNKKKVSMTGCLFDRVELNGKKGWISGFTGKSCYVKDADDQYLSTSPKYKQVSLSKLRILHHCGNWIIGAKKTLGNG

SEQ ID NO: 20490 - protein, 411 aa, unidentified
MVYVQDIDGKPMMPTTRHGKVRRLLKDNKAVVVNTCPFTIKLTYKTSDYKQEIVLGVDAGTKHVGLSATTKSKELYSGEVILRNDIVELLSTRRESRRTRRNRLRYRKPRFENRVKSKRLGWVAPSVRHRIDAHIRIINNVCSILPVSRVIVEVAQFDTQKIKNPEISGKEYQEGDQLGFWNVREYVLARDGHKCQHCKGKSKDPILNIHHIESRKTGGDSPSNLITLCETCHKEFHKGNIKLKVKRGKSLRDAAVMGIMKWRLYDKLKSLYPNVRMTFGYITKHDRINHGIEKSHVSDAFVISRNFDSERLGYYYKLKLVRRHNRQIHKMKIPKGGKKRMNQSPFKVFGFKLFDKVMFQGEERFIYARRLSGQFKIKDIDGNNERNISYKKLRYVSHGLISVSYTHLRAH

SEQ ID NO: 20491 - protein, 426 aa, Parasutterella sp.; identical to SEQ ID NO: 3045

SEQ ID NO: 20492 - protein, 419 aa, Geobacillus sp.; identical to SEQ ID NO: 2623

SEQ ID NO: 20493 - protein, 420 aa, Petrotoga sp.; identical to SEQ ID NO: 11467

SEQ ID NO: 20494 - protein, 465 aa, unidentified
MSTCVCVLSNNGERLMPTIRLGRVRHLLKDGKAKIIKHHPFTIQLLYDSKTNTQPIEICEDVGYNYIGISVKSQSHEYVSAQYDTLQDEKACHDSCRKLRRTRRNRLRYRKPRFDNRKRGEGWLAPSLKHKKELNVNVVKMYCTVMPITHATVEVGSFDTMLVKAIQEGKVIPEGADYQKGPRYNLATLREAVFYRDNYVCKICGRKATEGAILHMHHMFYWKGRHGNSLNELLTVCEKCHTPANHQKSGKLYGFGEKIKFADLSGAAFMNTVRWQIVNELYVAFGKPFVTITYGAMTKEKRIALQLEKSHNNDAYAMGEFHPNLRCMFEHYEKARRNNRILEKFYDSRYIDIRTGEIATGKELFNGRINRNHKKDSENLHKYRGKRTYAGHRALLRKKVNLNPCDLVSLNGENLIVHSTHTKKNGAVNVEFETPAKSGQKSASLKKLKIVKAANSIHPAWKKIS

SEQ ID NO: 20495 - protein, 493 aa, unidentified; identical to SEQ ID NO: 3154

SEQ ID NO: 20496 - protein, 442 aa, Lactobacillus sp.; identical to SEQ ID NO: 7095

SEQ ID NO: 20497 - protein, 461 aa, Parasutterella sp.; identical to SEQ ID NO: 3646

SEQ ID NO: 20498 - protein, 416 aa, unidentified
MPCSPAKARHLLDAGKAKVKKRTPFTIQLVYGSSGYTQEVILGVDAGSKTIGMSASTTKEELLSAEVKPRNDVVDLLSTRREFRRARRNRKTRYRKPRFDNRVRSRHKGWLAPSEEVKIQEHITAIKMVCRILPVSKVVVETAEFDLQLLKAIADGKPVPQGEDYQKGEMYGHYNVRQYVLWRDGYTCQCCGAHTTKKKEVRLHVHHLESRKTGGDAPGNLVTLCDSCHEKLHKGLITEDDFKKRKRRSTRDATFMGIMRKTLMQRLCSELPIPVIETRGYITKATREKLLVLPKSHTNDALAIAQGKHGFNVGYLPGIAQIDKIYTIRPVRHHNRQLHKATILKGGIRKSNQAEKYVFGYRLFDKVQFNGQDCFIWGRRTTGIFTIKTINGKMIKDGISFKKLKPVEKSTSYLIA

SEQ ID NO: 20499 - protein, 512 aa, unidentified; identical to SEQ ID NO: 2792

SEQ ID NO: 20500 - protein, 440 aa, unidentified; identical to SEQ ID NO: 5150

SEQ ID NO: 20501 - protein, 460 aa, unidentified; identical to SEQ ID NO: 8636

SEQ ID NO: 20502 - protein, 492 aa, unidentified; identical to SEQ ID NO: 4486

SEQ ID NO: 20503 - protein, 315 aa, unidentified
LRVFVWNKRRKPLMPCSPAKARHLLKEKKAAVVRRTPFTIQLTIATGESKQPVTLGVDAGYKHVGLSASTEKAELYASEVELRPDVSDLLSARRTLRQSRRNRKTRYRAPRFDNRIRTKRKGWLAPSVENRINAHLSRIGAILRLLPVTKITVETASFDTQLLKNPDISGKEYQEGEQLGFWNVREYVLFRDGHVCQHCHGRSKDPVLNVHHLESRRTGGDSPGNLIALCETCHKELHRGEITLKAKRGQSFRAETFMGIMRWEVLDRLKASHPKLEVQNTYGYRTKHARIVNGIAKSHCADAFCIAGNLGAERL

SEQ ID NO: 20504 - protein, 447 aa, unidentified; identical to SEQ ID NO: 8436

SEQ ID NO: 20505 - protein, 480 aa, unidentified; identical to SEQ ID NO: 16902

SEQ ID NO: 20506 - protein, 460 aa, unidentified; identical to SEQ ID NO: 3778

SEQ ID NO: 20507 - protein, 499 aa, unidentified
LMPTTRGGHVRHLLKEQKARVVRAKPFTIQLLYETNDVVQPLYLGIDPGRTNIGVAVVKANGTAVFTAHLETRNKEVPKLMQDRKKARRARRTNGRRCRRQRRAKANGTISKKCVKQDTAQSKNPSKRAKEIGIIKRRLPGYKKDVLCIGIKNKEAKYTNRTRPEGWLTPTANQLLQTHINLVRKMQKFLPISDVVLEVNKFAFMRLDNPDIQKWQYQQGPLYQKGSLENAVSEMQEHHCLFCDKPIDHYHHVVPQSENGSNTIANIVGLCAEHHNLVHKDAAWQKKLAEEKVGLNKKYGALSVLNQIIPALTNKLSVLFPKHFFVTAGKSTHDYRAAHGVSKDHWLDAYCIACSVLPSNVCDSNINNHMPYELKQFRRHDRRVLNNENMNRVYTLDNKAVAINRHKATEQEAASLEEFRKEHPNDVCKLKVKEHHPTYRNMNRNYPGSIFLVGKHVHIMQGIAGSKDGKATTYKDSNANSITASKCKFVAKNSGILFV

SEQ ID NO: 20508 - protein, 544 aa, Streptomyces sp.; identical to SEQ ID NO: 20174

SEQ ID NO: 20509 - protein, 411 aa, unidentified; identical to SEQ ID NO: 3917

SEQ ID NO: 20510 - protein, 420 aa, unidentified; identical to SEQ ID NO: 3288

SEQ ID NO: 20511 - protein, 512 aa, unidentified; identical to SEQ ID NO: 17480

SEQ ID NO: 20512 - protein, 472 aa, unidentified; identical to SEQ ID NO: 2630

SEQ ID NO: 20513 - protein, 411 aa, unidentified; identical to SEQ ID NO: 3917

SEQ ID NO: 20514 - protein, 431 aa, unidentified; identical to SEQ ID NO: 8316

SEQ ID NO: 20515 - protein, 521 aa, unidentified
MKQKKQKVIVYILNKKGKPLMPTTRCGHVRKLLDSKKAVVVNSNPFTIRLKYDTPNGIQDVFAGIDSGRENIGSGASNEDGDCLYLGELKTSNKSIKIKMTERTGFRRERRRHDRQSKQRKAKKDHTEIQNGNDDICRTTISCKSVQISYPVAEESVTHKIIRGKEGKFANRHRDEGWITPSARQLVQMHMNDLKSMCKILPISHVTLERVAFDFQKLENENIKVWEYGKGKLYGYDSPEEYIHDVQDGKCLVCGKPHIDYLHHIIPRSKGGSDKVSNIAGLCYDCHYGPMGVHNCQDTQNRLPELKNEANKQYKVSLLNSVMTVLIEEMDKFCKANSIIFSICEGHDTAKVRDMYDLQKDHCFDGFAISLVGRNVESVDVIPDRIYQKQRYKKKSKNIIQKRNCREYYDGKKLVAVNRHKGTDQKADSLEEYMNTYAETHTADECKNQFESLTVKPARRTYTFHKEGRICPFHIGDKVRYEKKNKIKGNTKVDTFICEGIYFSKDENKAEVEHNKTKSKK

SEQ ID NO: 20516 - protein, 223 aa, unidentified
MVYVLDKNGQPLMPTDRHRKVRLMLQSGQAKVIKRCPFTIQLNYDSGHQTQEISLGIDAGSKHIGVSATTKIKVLYEADVELRNDIVNLLSSRREFRRGRRNRKTRYRQAKFNNRRRGNGWLAPSIRQKIGTHLTVVENICKILPISRIMVETASFDIQKIKNTDIQGAEYQQGDQLEFWNVREYVLFRDGHICQCCKGKSKDKILNVHHIESRKTGAMPRTI

SEQ ID NO: 20517 - protein, 362 aa, unidentified
VLGVDAGTKHVGLSATTKGKELYSSEVILRNDIVDLLSTRRELRRSRRNRLRYRKPRFNNRIKSKRPGWVAPSVKYKVDAHIRVIDNVCSILPVSRIVIEVAQFDTQKIKNPNISGKEYQEGDQLGFWNVREYVLARDGHKCQYCKGKSKDKILNVHHIESRKTGGDSPSNLITLCETCHDDYHKGNIDLKIKRGSSLRDAAVMGIMKWRLYEELRSKHNRVSITFGYVTKYNRINHGIEKSHVSDAFVISKNFNAIRLGCYYKVRLVRRHNRQIHKQKIQKGGIKRLNQSTFEVFGFRLFDRVMFENGYYFIFGRRKIGSFDIRDIDSKRQNNITYKKLKLSRCKRFMIQMELNKKNTDMF

SEQ ID NO: 20518 - protein, 404 aa, unidentified
MVYVINKQGQAIMPTERFGKVRRLLKNSLAHVVCRIPFTIQLDYDTTDYTQPVSLGVDAGSKHIGISATTSEKEMYAADVELRNDIVDKLSTRREQRRTRRSRLRYRKARFNNRISSKRKGWLAPSVENKIQTHLTIVEKIHKFLPITNIVVETASFDIQKINNPSISGSEYQQGEQLDFFNVREYVLFRDNHICQHCKGKSKDKVLNVHHIESRKTGGDSPKNLITLCETCHKAYHRGEFELNVKRGKSFRDAAFMGIMRWSFYDRLKNIYPNVSMTFGYITKNTRITNNLPKDHYVDARCISGNPVAKPLGYYFYQKKVRCQNRQIHKANFLKGGRKKLNQAPFLVKGFRLFDLVEYQKELYYIFGRRSSGSFDIRKLDGTKVNKGSINCKHLRLIDKKKVY

SEQ ID NO: 20519 - protein, 372 aa, unidentified
TTHTQKINLGIDAGSKTIGVSATTESKVLYESEVVLRNDIVELLSGRRALRRSRRNRKTRYRKPRFDNRRRPDGWLTPSIRQKIKTHVTVVENVMKILPVTKIIVETASFDIQKIKNPKIEGAEYQYGEQLDFWNVREYVLFRDGHTCQCCKGKSKDNILNVHHIESRKTGGNAPNNLITLCETCHKAYHKGVITLPKEIHRGMRFRDAAFMGIMRWAFYDRLKELYTPFGVEVINTYGYITKNTRIEHGLPKEHYVDARCISGNPAAKPLGHYYFQKKVRCHNRQIHKNTILKGGIRKRNQAAYLVNGYRLFDKVKYQNQEYFIFGRRSSGFFDIRTLDGTKVNKGSISCKKLQLVEKSKHYLTEQRKVTT

SEQ ID NO: 20520 - protein, 424 aa, Enterococcus sp.; identical to SEQ ID NO: 4034

SEQ ID NO: 20521 - protein, 524 aa, unidentified
MEILRIDWKDICPTGQSGLPQKESFMRPVYVLDMNGKPLMPTCRFGKVRRMLKSGEAKVVDTLPFTIQLDRPTKTHVVQSVTLGCDPGRTNIGLAAVRSDGTDLYRSHCETRNKEIVDLMDARRAARRASRRGERLARKRLAAKHETATTFPDGRKLPGYEKPIMLKDIINTEARFNNRVRPAGWLTPTATQLLRTHLNLIKRISRILPVSDIALEINKFTFMQLDEPDKNKWNIDFQHGPLYGTGGLKAAVRQLQNDTCLLCQENVIEHFHHLIPRSKRGDNTINNIAGLCQRCHEAVHKSADTAEKLSTLKKGQTKRYGGTSVLNQIVPKLVEELGKTYHEHLHLTYGWQTKEFRTKHKLEKTHDTDAYCIAAGTMQTVKPNIRTDVYEIKQFRRHNRANIHHQTERTYKLNGQTVARNRRKRTDQKTDSLAEWFENTVKQYGQQKAEHLRAGLKVRKSTRYYNSKDRVMPGAVFQYEGNRYVVTGQLSGGQYYRAYGKGNQNFPAKKIRIISLNRGLVYVA

SEQ ID NO: 20522 - protein, 430 aa, Scytonema sp.; identical to SEQ ID NO: 3555

SEQ ID NO: 20523 - protein, 413 aa, unidentified
MTKYAFVLDADGKPLSPTKETKAWFLIRKKRARLVSKYPMVIQLNKRISGDDICKDEIRCGIDDGGLHVGIALVQKCATKNKVILKGTIEQRNDVKHLMVTRKGHRKYRRYHKRYRQARFNNRASSRRKGRIAPSILQKRQATIRVVNQLNKWINVTNYWLEDVSIDIRVLTDGYRPYRWQYQISNRLDENIRKAVILRDKCRCMECGKSNCILEVHHIKPKRLNGSNTLENLITLCKSCHQKTEGNEELFMNKYFSLLKSSDNKGLNYAQHTMIGKYWLREHLSAMGLLHLTNGGDTANKRIDWDIVKTHCNDAICIADLKPDTCDVKEWTIKPIRRQSKAKTTSVLGIQHRDLVEYTLKNGETRRGYVTALYPQLTALSFQSPIQRYSKVNARKCKLLWKFNKIYWIENVI

SEQ ID NO: 20524 - protein, 425 aa, unidentified; identical to SEQ ID NO: 8847

SEQ ID NO: 20525 - protein, 364 aa, unidentified
MVYVQDINGKPMMPTTRHGKVRRLLKDKKAVVVNLCPFTIRLTYVTSDYKQEIVLGVDAGTKHVGLSATTKSKELYSSEVILRSDIVDLLSTRRELRKTRRNRLRYRKPRFDNRVKSKRSGWIAPSVKYKIDAHIRIVDNVCSILPISRIVIEVAQFDTQKIKNPNISGKEYQEGDQLGFWNVREYVLARDGHKCQYCKGKSKDKILNVHHIESRKTGGDSPYNLITLCETCHKEYHKGNIDLKIRRGKSLRDAAVMGIMKWRLYEELKSKYDNISMTFGYVTKYNRIKHGIEKSHVSDAFVISKNFNAIRLGYYYKVRLVRRHNRQIHKQKIPKGGVKRLNQSPFEVFGFRLFDRVMFENSYY

SEQ ID NO: 20526 - protein, 331 aa, unidentified
LRVFVLNKRGKPLMPCSPAKARLLLKEKKAIVKRRTPFTIQLTIATGESKQPVTLGVDAGYKHVGLSASTEKAELYASEVELRQDVSDLLSARRALRQSRRNRKTRYRAPRFNNRLRTKRKGWLAPSVENRINAHLSRIEAVLRLLPVTKITVETASFDMQLLKNPDIAGKEYQEGEQLGFWNVREYVLFRDRHVCQHCYGRSKDPVLNVHHLESRGTGGDSPGNLITLCETCHKALHRGEITLKAKRGQSFRAEAFMGIMRWEVLGRLKASHPELEVNNTYGYRTKHARIANDIAKSHCADAFCIAGNLGAERLGEFFFQKQTRRNNRQI

SEQ ID NO: 20527 - protein, 427 aa, Enterococcus sp.; identical to SEQ ID NO: 3871

SEQ ID NO: 20528 - protein, 428 aa, unidentified
LKVFVLNMRGQPLMPCSPAKARHLLKAGKAVVKRRTPFTIQLRIATGETKQNVTLGVDAGAKHVGLSDTTEKEEVFASEVELRQDITGLLAARLSLRRDRRHRKTRYRAPRFLNRVRSKHKGWLAPSVENRIQAHMSRIDAVCRLLPVTKIVIETASFDIQKIKDPSVEGTDYQQGDQLGFWNVREYVLFRDGHVCQHCHGYSKDKILNVHHLESRQTGGDAPNNLITLCETCHKACHAGKIKLKVKRGQSFRAEAFMGIMRWTLLDRMRKAHSGLPVENTYGYLTKNTRITLGLPKTHCVDAYCIAGNLKAVRRGVCLHQRQVRKHNRQIHKCTVLSKTLKDGTKIGYRKLNQTPHLVKNFRLFDKVRCLGQTGFIFGRRSSGYFDVRRLDGVKLSSGISYRKLTLLEKRSTYLTELRKEDGASSPV

SEQ ID NO: 20529 - protein, 512 aa, unidentified; identical to SEQ ID NO: 10560

SEQ ID NO: 20530 - protein, 406 aa, unidentified
MVYVQDIDGKPLMPTTRHGKVRRSLKANKATVVNPCPFTIQLTYESTDHKRPVTLGIDAGAKHIGFSATTEKEELFACETILRTDIVDLLSTRSQNRRTRRSRLRYRKPKFNNRVFSKKKGWVAPSVKQRIDSHLNEVNEIHKILPITKIVIEAAQFDTHKMKNPNISGIDYQNGEQLGFWNVREYVLFRDGHKCSYCKGKSKDPILNIHHIESRKTGGDSPSNLITLRETCHKEYHKGDIDLKARRGKSLCGAAIMGIMKWRLYDELKSRYSNVSMTFGYITKYNRIKYGIEKSHTSDAFVISKNFNAKRIEYQYLKRLARRHNRQIHKMKILKGGKKKDNQAPFEVFGFRLFDKVLYNNEINFIYGRRKSGNFNIRDFNGENPKDVSYKKLKLIRGKRHPIILK

SEQ ID NO: 20531 - protein, 393 aa, unidentified; identical to SEQ ID NO: 10946

SEQ ID NO: 20532 - protein, 417 aa, unidentified; identical to SEQ ID NO: 5192

SEQ ID NO: 20533 - protein, 461 aa, Parasutterella sp.; identical to SEQ ID NO: 3646

SEQ ID NO: 20534 - protein, 466 aa, unidentified; identical to SEQ ID NO: 2809

SEQ ID NO: 20535 - protein, 474 aa, Lactobacillus sp.; identical to SEQ ID NO: 16230

SEQ ID NO: 20536 - protein, 456 aa, unidentified; identical to SEQ ID NO: 6594

SEQ ID NO: 20537 - protein, 460 aa, unidentified; identical to SEQ ID NO: 7734

SEQ ID NO: 20538 - protein, 424 aa, unidentified; identical to SEQ ID NO: 6292

SEQ ID NO: 20539 - protein, 452 aa, unidentified
LLRQGRLIVKEVAYMSTVYVLNKNGKPLMPTTRCGRVRHLLKEQKARVVTSNPFTIQLLYETDDVVQPLYLGIDPGRTNIGVAVVKTDGTAVFTAHLETRNKEIPKLMQGRKKARRARRTNGRRCRRQRRAKANDTISKKCVKQDTAQSGSASKRAKKIGVIKRHLPGCEKGVLCIGIKNKEAKFSNRTRPEGWLTPTANQLLQTHINLVKKIRKFLPISDVVLEINKFAFMQLDNPNIQKWQYQQGPLYQKASLEEAVSEMQEHHCLFCKKPIAHYHHVVPQSENGSDTIGNIIGLCTKHHDLVHKDTAWQKKLAKKKTGLNKKYGALSVLNQIIPALTKGLGSRFQGYFYVTTGKSTYDYREVHGVSKDHWLDAYCIACSVLPNDVCDSDINNRVPYELKQFRRHDRRALHKANINRVYTLNGKSVATNRHKATEQTTDSLEEFRQRQPN

SEQ ID NO: 20540 - protein, 450 aa, unidentified
MSVAVISKTGVRLMPTSEYRARKLLDSGKAIIYGYRPFTIQLTERETGDVQPVELCVDTGYIHIGVSVKSEKHEYLGLQVDTLTDEKTKHDDRRMYRRQRRNRKRYRKPRFDNRKRETGWLAPSLEHKKEIHLQIITAVCEVYPIADIALEMGNFDTQVLKAQEEGKPLPQGTDYQHGERYGIATLREAVFTRDGYKCQCCNRGIKEGAILHVHHIQYRSQGGTNRMSNLITLCEKCHTPANHKPGGKLYGWKPKVASFKGATYMTAVRWQLYDKVKEISECGVHITYGAETKERRRSLDIGKSHVNDAFVMGRFHPKHRSTPVLYKKKRRNNRCLEKFYDAKYIDSRNGKKRSGQELFNGRISRNHKKDSEDLHRYRKKKVSRGKRTIRVQRYKIQPHDIVLFDGKKYETTGCHNKGSRAILLPEKKSKSVEKLKIYKYAGGYYPSKFA

SEQ ID NO: 20541 - protein, 424 aa, unidentified
MVYVISQKNKPLMPCSSPIARLLLKQGRAKVKKREPFTIKLTYETTNYIQNLTLGVDTGSGTIGTGVSNDNSDIVYMSEVIVRNDITDKMTQRRKYRKNRRGRKTRYRKARWLNRANSTKTDRFTPTMQSKLHSHVKEIEYIKSILPVTTMVFETGQFDTHLMKNPNLANPKVKHWGYQKGVNYGFENTKAMVLNRDNYTCQCCKGKHKDSKLEVHHIIFRSQGGSDEESNLITLCHTCHKDLHSGTINFKLKGKLKGNLKYATQMNSIRKQLFRIYPDAIETFGYVTKANRLVLGIDKEHYYDACTIATQGNIFTVKSNLYKKKCVSDGDFQKTKGIRSEQPIVTDKVCGFRKFDKVRYFGNDYFIKGRMSTGYAILMDIDGNKADFSAMPKGYKTPKMVKLKRIEARTTWMITTVEVTPNIA

SEQ ID NO: 20542 - protein, 460 aa, unidentified
ENKPVLQPITIAEDPGRSNIGMAVVSLSGELLSAAVVQTRNKEIVKLMDKRKQHRRASRNGERKARQRLAKKCHTMIKAGFLMRKLPMYGKDKRVKCLVIKNTESRFCNRKREDGWLTPSAEHLVQTHINLIHKMQKFLPITDVAIEINRFAFLSLEDPSISGVDFQKGPLKGYDDLNAAVEDLQDGHCLMCNSPIEHRHHIVPRSMQGSNTIGNIAGLCCKCHEKVHKDSAFEDSLKKKKAGLNKRYAAVSVLNQAIPFICKRLEQEFGKEHVHYCSGRDSSMVRRSLGYHKTKEEQLHEVDAWCIAVLSLQHVPEKAPEFDHVHEILQFRRQDRSRIKAQTSRAYYHEGKKIAKNRKKAEGQREDSLQEWRKRQVERYGEEQTRKMISQLKVKKSIRRYNRLDRLMPGAVFYYQGVRYVMRGQHCEGTYLQAVGMGSKDFPAKKCKIVAQNEGLVFVS

SEQ ID NO: 20543 - protein, 414 aa, unidentified
LKVFVLNMRGQPLMPCSPAKARHLLKAGKAVVKRRTPFTIQLRIATGETKQNVTLGVDAGAKHVGLSATTEKEEVFASEVELRQDITGLLAARLSLRRDRRHRKTRYRAPRFLNRVRSKHKGWLAPSVENRIQAHMSRIDAVCRLLPVTKIVIETASFDIQKIKDPSVEGTDYQQGDQLGFWNVREYVLFRDGHVCQHCHGRSKDKILNVHHLESRQTGGDAPNNLITLCETCHKAYHAGKIKLKVKRGQSFRAEAFMGIMRWTLLDRVRKAHPGLPVENTYGYLTKHTRITHGLPKTHCVDAYCIAGNLKAVRRGVYLHQRQMRKHNRQIHKFTVLSKRLEDGTKIGYRKFNQSPYLVHGFRLFDKVRCLGQIGFIFGRRSSGYFDVRRLDGVKLSSGISYRKLTLLEIFNRT

SEQ ID NO: 20544 - protein, 470 aa, Anaerostipes sp.; identical to SEQ ID NO: 2825

SEQ ID NO: 20545 - protein, 424 aa, Kosmotoga sp.; identical to SEQ ID NO: 18166

SEQ ID NO: 20546 - protein, 346 aa, unidentified; identical to SEQ ID NO: 4983

SEQ ID NO: 20547 - protein, 418 aa, unidentified; identical to SEQ ID NO: 7032

SEQ ID NO: 20548 - protein, 415 aa, unidentified; identical to SEQ ID NO: 10543

SEQ ID NO: 20549 - protein, 431 aa, unidentified
MPNKVYVINKHGRPLMPCSPAKARHLLDEGKAKIKKRTPFTIQLVYGSSGYTQEVILGVDAGSKTIGMSASTTKEELLSAEVKPRNDVVDLLSTRREFRRARRNRKTRYRKPRFDNRVRSKHKGWLAPSVEVKIQEHITSIKMVCRILPVSKVVIETAEFDLQLLKAIADGKPVPQGEDYQKGEMYGHYNVRQYVLWRDDYTCQCCGAHATKKKEVWLHVHHLESRKVGGDAPDNQVTLCESCHEKLHKGLITEKDFKKRKRRSTRDATFMGIMRKTLMQRLCSELPIPVVETRGYITKATREKLLVLPKSHTNDALAIAQGKHGFNVGYLPGIVQINKIYTIRPVRHHNRQLHKATILKGGIRKSNQTEKYVFGYRLFDKVQFNGQDCFIWGRRTTGIFTIKTINGKMIKDGISFKKLKLAEKSTSYLIA

SEQ ID NO: 20550 - protein, 512 aa, unidentified
MSTVYVLNKDGKPLMPTTRGGHVRHLLKEQKARVVRTNPFTIQLLYETDNLVQPLYLGIDPGRTNIGVAVVKTDGTAVFTAHLETRNKEIPKLMQGRKKARRARRTNGRRCRRQRRAKANGTISKKCVKQATAQNGSVSKRANEIGVIKRHLPGCEKEVLCIGIKNKEAKFSNRTRPEGWLTPTANQLLQTHINLVKKIQKFLPISDVVLEINKFAFMRLDNPNVQKWQYQQGPLYQKASLEEAVSEMQEQHCLFCKNTIDHYHHVVPQHKNGSNTIGNIVGLCAKHHDLVHKDTSWQEKLAKKKTGLNKRYGALSVLNQIIPALTKELSSLFPKHFFATNGKSTYDYRAAHGVSKDHWLDAYCIADSVLPNDACDNNINNRVPYELKQFRRHDRRALHKENMSRVYTLNGKKVATNRHKAVEQATDSLEEFCQNHPDDVCKLKVKEHHPEYRNPKRNFPGCVFLVGKHTHVMQGTSGSHNGKADGYYDTNGNSYSSGKCKFVVKNEGIVFT

SEQ ID NO: 20551 - protein, 442 aa, Lactobacillus sp.; identical to SEQ ID NO: 9501

SEQ ID NO: 20552 - protein, 404 aa, unidentified; identical to SEQ ID NO: 18194
  source 1..404: note = Clostridiaceae bacterium UBA2240

SEQ ID NO: 20553 - protein, 427 aa, Enterococcus sp.; identical to SEQ ID NO: 2410

SEQ ID NO: 20554 - protein, 324 aa, Lactobacillus sp.; identical to SEQ ID NO: 13123

SEQ ID NO: 20555 - protein, 423 aa, Moorena sp.; identical to SEQ ID NO: 11977

SEQ ID NO: 20556 - protein, 414 aa, unidentified
MVYVINKQGQALMPTERFGKVRRLLKNSLAHVVCRIPFTIQLDYDTTDYTQPVSLGVDAGSKHIGISVTTSEKELYAADVELRNDIVDKLSTRREQRRTRRSRLRYRKARFNNRVSSKRKGWLAPSVENKIQTHLTVVEKIHKFLPITNIVVETASFDIQKINNPSISGSEYQQGEQLDFFNVREYVLFRDNHTCQHCKGKSKDKVLNVHHIESRKTGGDSPNNLITLCETCHKAYHRGEFKLNVKRGKSFRDAAFMGIMRWSFYDRLKNIYPNVSMTFGYITKNTRTTNNLPKEHYVDARCISGNPVAKPLGYYFYQKKVRCQNRQIHKANFLKGGRKKLNQAPFLVKGFRLFDLVEYQKELYYIFGRRSNGSFDIRKLDGTKVNKGSINCKHLRLISTRKSILIEKRTQVNL

SEQ ID NO: 20557 - protein, 513 aa, unidentified
LKKEAAGHRQGKDCRPVRYGPPYRAGMPDGRRKPERKHMVAVVTSTGKPLMPTSAYRARKLLKKGRAVIFKYRPYFTIQLVDRADGEVQEVEYKSDTGSVHVGISVCTEKKELLSEQRDLLENEPEHHNDRKKNRRTRRNRKRYRKPRFDNRKKKPQEGHEKWLPPTLLHKMEVQVRLFREFCRVVPVTSACFEMGKFDTQALKAVSKGEPVPEGEGYQKGERYGTDTLRAAVFLRDGHTCRFCGRSVKDGAILHVHHVGYWKGDRTNRPANLASACEQCHTPANHGKNGILYGKEPEFKTLKDASYMTSVRWIMLDEIKKAAPGVQVSVTYGVTTKRKRQELHLPKSHVNDAFSMASFHPKKRSDTEYWKKIPRHDRVLQKFYDAVYLDTRDGSEKKGSELSNGRISRNHKKDSENLHQYRGHKVSKGHNSIRRGASSLKPGSIVMYKGEKMTVHGTHTRYVKGKDGKTAKKVNVQFTCPASDGKKSASLEKCTPVSRVYNTGWKRYWPDKK

SEQ ID NO: 20558 - protein, 493 aa, unidentified; identical to SEQ ID NO: 2644

SEQ ID NO: 20559 - protein, 339 aa, unidentified
LLSARRALRQSRRNRKTRYRAPRFNDRLRTKRKGWLAPSVENRINAHLSRIETIIRLLPVTKITVETTSFDMQLLKNSDIAGKKYQEGEQLGFWNVREYVLFRDGHVCQHCHGRSKDPVLNVHHLESRRTGGNSPGNLITLCETCHKALHRGEIKLKAKRGHSFRAQAFMGIMRWEVLNRLKASHPELEVNNTYGYRTKHVRIRNGIAKSHCADAFCIAGNLGAERLGEFFFQKQTRRNNRQIHKLSILKGGIRKRNQAPFEVKGFRLFDKVAYKGEEGFIFGRRSSGFFDVRKLDGTRISAGISYKKLHLLEKRRTYLTEIRKEEALPPPPEGRGLRA

SEQ ID NO: 20560 - protein, 480 aa, unidentified; identical to SEQ ID NO: 4735

SEQ ID NO: 20561 - protein, 292 aa, unidentified
MKDDLISGIDYQNGDMFGFWNVREFVLHRDGHKCQNPNCKHKDKKEQILKVHHIRYRSEGGSDRPENLITLCSKCHIPANHKKGKFLYDWCVNGKKVRGFKDATFMSMIRWYLVNELKSKHNNVSITYGYITKNHRIQNGIEKSHLNDAFAIAKGTNQARTKDRFLVIQDRLKNRSLEKFYDSKIIDIRTGKKVSGGDLSCGRSTRNKNLNTENLRKYRGAKISKGQRRIRKQKYFYQPNDLVKYDGKVYTVKGTQNEGKYIALKEIKKVPKVELLIPYVFKKGLNWSYGLC

SEQ ID NO: 20562 - protein, 430 aa, unidentified; identical to SEQ ID NO: 15171

SEQ ID NO: 20563 - protein, 480 aa, unidentified; identical to SEQ ID NO: 2726

SEQ ID NO: 20564 - protein, 424 aa, Nodularia sp.
MSNFVLVLDTNKKPLTPIHPGDARFLLNQQKAAVFRRFPFTIILKEPKSEVPTQPIELKIDPGSKTTGFALVQNNKVIWGMELQHRGLAIKESLETRKGVRRGRRSRHTRYRQARFLNRTKPQGWLAPSLSHRVLTINTWVKRLCNFAPITDIVEELARFDLQQLENPEISGFEYQQGELQGYEVREYLLNKWNRKCAYCTAENVPLQVEHIKPKAKGGTNRISNLCLACEKCNIKNVLKILRSFSKKPELLKQILSQAKRPLKDASAVNSTRWALFNKLKETGLPITTGSGGLTKFNRTRLGLPKTHWIDAACVGKVETLKILTTKILTVKSTGHSCRRFCRINKFGFPCTEPKKIFTHVSTGDFVKATLHKDRKNITSGKYVSRVKTPTKNGCEIVINGFRVEFSTMKDITKVHCSDGYSYV

SEQ ID NO: 20565 - protein, 429 aa, unidentified
LQFYRKEHGIMQYVYVLSKHGEPMMPCSPGKARLLLKQQKACVVRRTPFTIKLLYGSAGYKQPITLGVDAGSKHVGLSASTEKRELYREEFAPRNDVVELLSTRRQNRRSRRNRKTRYRAPRFDNRVHSKHKGWLAPSVEVKIQEHITIIKRICKILPISLVRVETAEFDTQRLKAMLAGKPLPVGTDYQLGEMYDEYNVRQYVLKRDNYTCQCCGAHTTAKKLVKLHVHHLESRKTGGNAPSNLITLCTTCHKNLHKGKVTLDGKERGKPLRDAAFMGIMRKTLMARLKKELPIPVQGTYGYITKMRREQNDIKKSHTNDARCISKHPLAEPCSVCYRTKAIRHHNRQTHKANFSKKGIRKRSQMPYLVEGYRLWDKVLYKEQECFVSGRRSSGSFTLKKLDGTSVSKGVTFKKQRLLEPATNYLIER

SEQ ID NO: 20566 - protein, 308 aa, unidentified; identical to SEQ ID NO: 10888
  source 1..308: note = Cyanobacteria bacterium UBA11369

SEQ ID NO: 20567 - protein, 494 aa, unidentified
MTMVYVQNKDGKPLMPTTRYCYVRLLLKEKKARVVCTTPFTIQLNYDTPDITQDLILGIDPGRTNIGVAVVKEDGQCVFSAHLETRNKDVPLLMKKRAAFRRNHRTLDRRRKRQRRAKAAGTTIADGSAERLLPGYEKPIVCHYIRNKKARFNNRCRPAGWLTPTANHLLQTHINLIAKVAKFLPITKVVVELNRFAFMAMDNPNIRRWEYQQGPLYGLGSVEDAVYAQQDGHCLFCEKPIDHYHHVVPRHKGGSETLANRCGLCVKHHDLVHKDKAWADKLVTRKEGMNKKYHALSVLNQIIPFLMKYLGDETLYDVYATDGRSTKGFRIAKNVPKEHYTDAYCIACSILDTDIKVSAPVEPFELKQFRRHDRQACIRQMVDRKYILDGKVVATNRNKAFEQESDSLQEFREVYGDAAVSQLTVKPHPPQYKDMTRIMPGAVMDFNGVVDVFQRSEGFHNGKPDYYKSTKGARVLTKRCVLLTQNAGTVFIPA

SEQ ID NO: 20568 - protein, 429 aa, unidentified
MLVYVLKQNGQPFMPTKRFGKVRRLLKTKKAKVVRREPFTIKLLYEPETDVVQECYCGVDTGSRHIGVAVVSNDKVLYQSQTELRSDIKRKMDARRMYRRNRRQRKTRYRKPRFLNRKNSIKKDGLLPSVKHKVQAHIDEIEFCKKILPISDSNLVIEVSQFDTALMKDPSLNSEKIKHWGYQQGFNYGYSSRREAILHRDNYTCQCCGKKNCRLEVHHVKFKRDGGTDDEENLLTLCEDCHKGVHAGTVTLNKKPKKSKNLNHATHMSIIRSYLLKRYPNAIETFGFVTSENRNHLNLPKDHYIDACVIASGGLEIKQLDVIFYKRRVSKGNYQLTKGVRGELKIPTGKICGFRKFDKVEYLGNVYFIKGRMSKYGYCFLTDIFGNKIDFSCMTRGTKTPKLSSCKRISARSSCLCIRKKITLNINNI

SEQ ID NO: 20569 - protein, 451 aa, unidentified
MPVAVISKTGERLMPTSEHRARKLLKSGKAIKYSYHPFTIQLAERESGDVQPIELCMDTGYIHIGISVKSEKHEYLAEQIDTLTDEKARHDACRMYRRQRRSRKRYRQPRFNNRKRNDRWIAPSLEHKKSIHIQAILRICKVMPVTDITLEMGNFDTQVLKAREEGKSLPQGVDYQHGERYGITTLREAVFSRDGYTCQCCGRTIKDGAILHVHHIVYRSQGGTNRMSNLITVCDKCHTPANHKQGGKLYNWKPKIASFKGATYMTTIRWKLYNEVKALFPDIDIHVTYGAETKERRRALDIDKSHVNDAFVMGQFHPKHRSKPICYKKKRRNNRCLEKFYDAKYIDSRDGKKRSGQELFNGRISRNHKKDSENLHQYRLQKVTPGRRAIRRQHYPIQPHDIIVYNGNKIEVSGCQHKGTRVVFSKTKKSVQISKIKLFKYAGGYSKSVFN

SEQ ID NO: 20570 - protein, 424 aa, Spirulina sp.
MRVFVIDKNKHPLDPCYSARARKLLKAGKAKVFKQNPFTIILVDKEVEESQDYQLKIDPGSKTTGLAILKSNRVIWAAELTHRGQQIRDALTARRQLRRGRRNRKTRYRKPRFLNRTRREGWLPPSLMSRVHNIMTWVNRLQRVCPITQLSQELVRFDTQAIQNPEITGVEYQQGELVGYEVREYLLEKWGRKCAYCGAKDTPLEVEHIQPKSKGGSNRVSNLTLACHACNQAKGNQEVTEFLSGKSNLLTRILKQAKAPLKDAAAVNSTRWALLKAFKATGLPAETGTGGQTKFNRSRQGLPKTHWLDAACVGQSTPEQLVIEVDKPLLIAAKGHGTRQRCRPDRFGFPKAHAPKAKSFQGFQTGDVVRAVIPKGKFAGRYTGRVAIRFRPSFRLAVGTAKPFDVHPKYLRIIHHADGYQYSF

SEQ ID NO: 20571 - protein, 406 aa, unidentified; identical to SEQ ID NO: 15532

SEQ ID NO: 20572 - protein, 431 aa, unidentified
MPNKVYVINKHGRPLMPCSPAKARHLLDEGKAKIKKRTPFTIQLVYGSSGYTQEVILGVDAGSKTIGMSASTTKEELLSAEVKPRNDVVDLLSARREFRRARRNRKTRYRKPRFDNRVRSKHKGWLAPSVEVKIQEHITSIKRVCRILPVSKVVVETAEFDLQLLKAIADGKPVPQGEDYQQGEMYGHYNVRQYVLWRDNYTCQCCGTHPSKKKEVRLHVHHLESRKVGGDAPDNQVTLCESCHEKLRKGLIAEKDFKKRKRRSTRDATFMGIMRKTLMQRLCSELPIPVVKTRGYITKATREKLLVLPKSHTNDALAIAQGKRGFNVGYLPEIAQIDKIYTIRPVRHHNRQLHKATILKGGIRKSNQTEKYVFGYRLFDKVQFNEQDCFIWGRRTTGIFTIKTINRKMIKDGISFKKLKLVEKSTSYLIA

SEQ ID NO: 20573 - protein, 465 aa, unidentified; identical to SEQ ID NO: 3070

SEQ ID NO: 20574 - protein, 423 aa, Phormidium sp.; identical to SEQ ID NO: 20072

SEQ ID NO: 20575 - protein, 442 aa, unidentified; identical to SEQ ID NO: 2903

SEQ ID NO: 20576 - protein, 443 aa, Anoxybacillus sp.; identical to SEQ ID NO: 12144

SEQ ID NO: 20577 - protein, 450 aa, Clostridium sp.; identical to SEQ ID NO: 10471

SEQ ID NO: 20578 - protein, 394 aa, unidentified
MPTTRHGKVRRLLKAKKATVVNLCPFTIRLLYDTTGYKQEITLGVDAGTKHVGLSATTKSKELYASEVILRSDVVDLLSTRRELRRARRYRLRYRKPRFNNRIKSKKDKWIAPSIRQKIDSYIRIIGFVYSILPVSKLIIEVAQFDTQKIKNPEISGKEYQEGEQLGFWNVREYVLARDGHKCQHCKGKSKDPVLNVHHIESRKTGGDSPSNLITLCETCHKEFHKGKIKLKVKRSASLRDAAVMGIMKWELYDELKSLYPNIKMTFGYITKHDRINHGIEKSHVSDAFVISRNFDSYRLGYYYKQKLVRRHNRQIHKMKILKGGIKKPNQAPFKVFGFRLFDKVRYQDNVYFVYGRRTSGCFNIRDINGNNNKNPTFKKLTYISHGLISVETV

SEQ ID NO: 20579 - protein, 490 aa, unidentified
MNYVYVLDKKGKPLMPTTRYGKVRRMLKSGQAKPIQNLPFTIQLTYIPKTTVCQPVIVGFDPGRTNIGISAVREDGTCLNLTHCETRNREIPKLMQKRKEHRQTSRRGERLVRKRLAKRHGTVSSKPLERILPGCEKPLKVKDIINTESRFNNRLRSEGWLTPTATQLLRTHVNLLKRMCQILPATDVVMEVNRFAFMQLDQPNVKKCGIDFQHGPLFGTDGIKEAVSIQQDGRCLLCEKRTIEHYHHIVPRAYRGSDTAENIAGLCAACHKLVHTSREASNKLKHKKDGINKKYGGISVLNQVIPFLFMEFEQMFPGHTYATNGWNTKQFREKYRLAKDHSVDAYCIAASILPEPKVELPEDTHEIVQYRRHDRARIKRQTERTYCLGKKGVCKNRHKRFEQKTDSLEEYVEKYPNFLSNLTVKKSQRSYNDLKRVLPGAVILYQGKRYILSGRSSGGKQYRMLGYGNQNFTASKCTIVQQNTGLVYVS

SEQ ID NO: 20580 - protein, 427 aa, unidentified; identical to SEQ ID NO: 10436

SEQ ID NO: 20581 - protein, 442 aa, unidentified; identical to SEQ ID NO: 2903

SEQ ID NO: 20582 - protein, 512 aa, unidentified
MSTVYVLNKDGKPLMPTTRGGHVRHLLKEQKARVVRTKPFTIQLLYETDDVVQPLYLGIDPGRTNIGVAVVKADSTAVFTAHLETRNEEIPKLMQGRKKARRARRTNGRRCRRQRRAKANGTISKKCVKQTTAQNGSASKRAKEIGVIKRHIPGCEKDVLCIGIKNKEAKFSNRTRPEGWLTPTANQLLKTHINLVKKIRKFLPISDVVLEINKFAFMRLDNPNIQKWQYQQGPLYQKASLEEAVSEMQEHHCLFCKKSIAHYHHAVPQSENGSNTIGNIVGLCTKHHDFVHKDTAWQKKLAKKKTGLNKKYGALSVLNQIIPALTKELSSLFPKHFYATNGKSTHDYRIAHGVSKDHWLDAYCIACSVLPNDTCDRTINSRVPYELKQFRRHDRRALHKENMSRVYTLNGKSVATNRHKATEQTTDSLEEFRQRQPNDVCKLKVKEHHPTYRNMNRNYPGSVFLIGKQVHVMQGIAGSKDGEATTYKDTNANSIAAGKCKFVAKNSGILFV

SEQ ID NO: 20583 - protein, 436 aa, unidentified
MTKTLTKQTTQACVLDQQGKPLMPTTRLGKIYRLLKTQKAHIVSHEPFTIQLNYEPDTHIIQPMTLGVDSGAIHSGYSVTNENREYYSAEVIARDNISKHLLNRRMYRKNRRSRKTRYRKPRFKNRKNEKKGWLPPSLKQKVTVQLKEIDHLHHHFPIETIIVEVAEFDIQKIKNPNISGIEYQQGTLQGYNIRNYLLEKHGRKCFYCEKTVSKFEVEHMIPKTRGGSNRIDNLTLSCHECNQKKDTLTAEEFIKQILPAKKATAKLKQLPNEKRLFKYMAHMNATRWSLYNTIKEKYANVKMTYGYITKYNRIQAGLPKAHHIDAKCITGFTTVPSIDQTVVKIKMRRHNRQLHQLTFSKGHVRKAASLPTIIFGFQLYDLVLFNNHRYYIKSRRSSGSFDLVSVEGLKDTNRSYKKLTLLAHTNAYLTNRYTNE

SEQ ID NO: 20584 - protein, 391 aa, unidentified
VVRRTPFTIQLTIATGESKQPVSLGVDAGYKHVGLSASTEKAELYASEVELRKDITDLLSARRALRQSRRNRKTRYRAPRFDNRIRTKRKGWLAPSVENRINAHLSRIEAVLRLLPITKITVETASFDMQRLKNPDISGKEYQEGEQLGFWNVREYVLFRDGHVCRHCHGRSKDPVLNVHHLESRRTGSDSPDNLITLCVTCHKALHRGEITLKAKRGQSFRAQAFMGIMRREVLNRLKASYPELKVHETYGYLTKHARIANGIVKSHGADAFCIAGNLGAERLGEFFFQKQTRRNNRQIHKLSILKGGIRKRNQAPFEAKGFRLFDKVACQGEEGFIFGRRSSGSFDVRKLDGTRISAGISCKKLRLLEKRRTYLTEIRKEEALPPLPEG

SEQ ID NO: 20585 - protein, 471 aa, Sulfobacillus sp.
MAVLVLDKRKNPLMPCSEKRARLLLERGRARVHRMVPFTIRLVDRRQEDSGLQDIRLKLDPGSQTTGAALVREVDSVEATTGEIRRTDVVLMLLELQHRGHAIRDALTGRRAFRKRRRGNLRYRAPRFNNRARPAGWLAPALQHRVDTTMAWVSRLRRWVPVTALSQERVRFDTQALQNPEISGAEYQPGTLAGYEIREYRLEQWGRACAYCEAENTPLEIDHIHPKSRGDSDHVSNLAIVCHDGNQAKGTRPLEQFLAKDPQRVRTILAQAQAPLCDAAAVNSTRWVLFAKLNETELPVEVGAGNRTKWNRHRLLIPKAHCLDAACVGRVDAVQRWQQPVLQIKATGRGRYQRTRLTRHGFPRGYLTQQKRHFGFQTGDMVKAVVTKGKKIGAYWGRVAIRASGRFDIQTGNGRVQGIHHRFCQFIQRADGYGDSWATIASTQGDAGVGAAGDAALSLPGIKAGVSRAIG

SEQ ID NO: 20586 - protein, 456 aa, unidentified
MSTCVCVLSNNGERLMPTFRLGKVRRLLKDGKAKIVKHHPFTIQLLYDSKTNKQPIEICEDVGYNYIGISVKSESHEYVSAQYDTLQDEKEHHDDCRKMRRARRNRLRYRKPRFDNRKRSEGWLAPSLEHKKQLNISLVERYVSVIPITHATVEVGSFDTMLLQAIQKGETKPEGADYQEGPRYNLATLREAVFYRDNYTCQVCGRKITDGAILHMHHMFYWKGRHGYKLDELVTACEKCHTPANHQKGGKLFGFGEDKEFADLSGAAFMNAVRWQIVNALYATYGKEFVTITYGAMTKEKRIALQLEKSHNNDAYAMGDFHPVHRCGFRHYQKRRRNNRVLEKFYDATYIDARTGNKAKGKELFNGRISRDHKKDSENLHKYRSEKVSKGRRSIRKRRYAIQPYDTVRLKGKTYITSGCHNKGTRLLIPVNGKSKSVAISKVRVVCHAGAWIQII

SEQ ID NO: 20587 - protein, 465 aa, unidentified; identical to SEQ ID NO: 3856

SEQ ID NO: 20588 - protein, 425 aa, unidentified
MVYVLNKNGQSLMPTNRHGKVKHLLKDGKAKVVKRCPFTIKLTYETTNYTQDLTLGVDTGSGTIGTAVSKDSGDIIYMSEIVVRNDITNKMSQRAKYRRNRRNRKTRYRQARWLNRRNSIRKDRFSPTMQSKLHSHVKEIEYIKSILPITTMVFETGQFDMHLMKNPMLANPKVKHWGYQKGTNYGFENTKAMVLNRDNYTCQYCKGKHKDSKLEVHHIIFRSQGGSDEDSNLITLCHTCHKNLHDGKIAPNFKGKAKGTLKYATQMNSIRKQLFRLYPEVIETFGYVTKANRLAIGIEKEHYYDACTIATQGKPFIVKTNLYKKKCISDGDFQKTKGIRSEQPIVTDKIYGFRKFDKVKYFGKEYFIKGRMSTGYAILMDIEGNKADFSTMPKGFKTPKMINLKRLEARSSWMVTIVEGTPNIA

SEQ ID NO: 20589 - protein, 398 aa, Geobacillus sp.; identical to SEQ ID NO: 7037

SEQ ID NO: 20590 - protein, 447 aa, unidentified; identical to SEQ ID NO: 12853

SEQ ID NO: 20591 - protein, 470 aa, unidentified
MSVFVVGLNGCRLMPTSERKARLLLKEGKASVYRKVPFTIKLNYKTGSTVQPGYLGIDTGSQHIGITAVREDGTVLHKEEIGLRDSMTKRKLLESKASLRRGRRYRKTRYRHPKWRPETKRVYCEKPDRKGRHWKKQKNTFTSKRQAGWLPPSLQSKTDHHIRWIRKILGLLPEGYRLSIELGRFDPARMKDPEIHGELNQKGPQYDYENVRAYVLDRDRYTCQACKKKGGKLQVHHILYKSSGATDNPQYMATVCSNCHTLENHQPGGILYRWKQEQKKFTRGLRDATFMSILRKRLMEAFPDAVFTYGNITKVDREALKLPKSHADDATAIALVRTGITSVKDNEPVIHIQQVRRKKRSLHEENPRKGRKEPNRTASRNSKNTKSVTVNKKLGKIKTQVTAWLFDRVELDGKKGWVSGFTRKSCYVKDRQDKYVCLSKKYDSVSITKLKILHHCGNWVVGAETTLGKC

SEQ ID NO: 20592 - protein, 432 aa, unidentified; identical to SEQ ID NO: 7222

SEQ ID NO: 20593 - protein, 421 aa, unidentified
MLVYVISKDGQPLMPISRCGKVRRLLKNKRAKVVRRCPFTIKLLFEPENDFVRECYCGVDTGSKHIGVAVVGNDRVLYQSQTELRNDIKKKIDRRRGFRRLRRSRKTRYRKPRFLNRRNSIKKDRLPPSVKHKVQAHIDEIEFCKKILPISDLILEVSQFDTALMKNPSLISEKIKHWGYQQGFNYGYSSRRSAILHRDGYTCQCCGKKHCRLEVHHIIFRSNGGTDDENNLITLCEDCHKGVHAGTVVLNKKPKKMNLKHATHMSIIRSQLLKIYPQAIETFGFVTSENRNHLGLEKSHYIDACVIASGGLEFEQPDVVYYKRRVSKGDYKLARGSRSEQKLHTGKVHGLRKFDKVKYLNQEYFVESRINTGFAKLMDVFGNQADFSFASRGHKTPKLSNCKRINARRSTLCMWLANTIN

SEQ ID NO: 20594 - protein, 453 aa, unidentified
MSVAVISKTGERLMPTSEHRARKLLKSGKAIKYSYHPFTIQLTERESGDVQSIELCVDTGYIHIGISVKSEKHEYLAEQIDTLTDEKARHDACRMYRRQRRSRKRYRQPRFNNRKRKDRWIASSLEHKKSIHIQAILRICKVMPVTDITLEMGNFDTQVLKAREEGKPLPQGVDYQHGERYGITTLREAVFARDGYTCQCCGRAIKDGAILHVHHIVYRSQGGTNRMSNLITVCDKCHTPANHKQGGKLYNWKPKIASFKGATYMTTIRWKLYNEVKALFPDIDIDITYGAETKERRRAFDITKSHVNDAFVMGQFHPKHRSKPVCYKKKRRNNRCLEKFYDAKYIDNRNGKTRTGQELFNGRISRNHKKDSENLHQYRRQKISAGKRTIRKQHYAIQPHDIVIFNGEKFETSGCHNNGTRVILLPQKKSVAIKKLNIYRYAGGYFKSAFNQK

SEQ ID NO: 20595 - protein, 418 aa, unidentified; identical to SEQ ID NO: 15302

SEQ ID NO: 20596 - protein, 431 aa, unidentified
MPNKVYVINKHGRPLMPCSPAKARHLLDAGKAKVKKRTPFTIQLVYGSSGYTQEVILGVDAGSKTIGMSVSTTKEELLSAEVKPRNDVVDLQSTRREFRRARRNRKTRYRKPRFDNRVRSKHKGWLAPSVEVKIQEHITSIKMVCRILPVSKVVIETAEFDLQLLKAIADGKPVPQGEDYQKGEMYGHYNVRQYVLWRDDYTCQCCGAHATKKKEVRLHVHHLESRKVGGDAPDNQVTLCESCHEKLHKGLITEKDFKKRKRRSTRDATFMGIMRKTLMQRLCSELPIPVVETRGYITKATREKLLVLPKSHTNDALAIAQGKRGFNVGYLPGIIQTDKIYTIRPVRHHNRQLHKAAILKGGIRKSNQVGKYVFGYRLFDKVQFNGQDCFIWGRRTTGIFTIKTINGKMIKDGISFKKLKLVEKSTGYLIA

SEQ ID NO: 20597 - protein, 448 aa, unidentified
LAKGKLLRKEVHFLLVYVLNKHGRPLMPCKPSKARKLLKQGKAKIVKYEPFTIQLLYGSSGYKQKCVLGIDAGSKNIGLVVTIEDGRVIYKAQATLRQDIRENIETRRRLRRTRRYRKTRYRKPKIFTSKWRNGWLPPSIRARIDAHYNIVKKICSITPIKEIVVEVGQFDVQAIINPDIQGEEYQNGELKGFDSVKEYVKIRDNFQCHYANLRPDIPCSGKLTVDHIIPRSRGGTDNPTNLVCCCEMHNMAKGNMSYKEFTGHEPPSIRDFRPTVFMNALMKHLVPRLQELAPTKYTFGYVTKRRRKEWGLEKSHINDAIAIAGIKPRWQDNVWYYIRQVRKKKRSLHEEIPRKGRNKPNREAKRNNKNVKEIVTKSGKWCLWDKVKITTTGEIGFISGFTGKWVYVQDIDGNYLQLSDKYKQINPSELVLICRNNNYITQQFISTL

SEQ ID NO: 20598 - protein, 422 aa, unidentified
LNKRGKPLMPCSPAKARLLLKEKKAIVVRRTPFTIQLTIATGESKQPVSLGVDAGYKHVGLSASIEKAELYASEVELRKDITDLLSARRALRQSRRNRKTRYRAPRFDNRIRTKRKGWLAPSVENRINAHLSRIEAVLRLLPITKITVETASFDMQRLKNPDISGKEYQEGEQLGFWNVREYVLFRDGHVCRHCHGRSKDPVLNVHHLESRRTGSDSPDNLITLCETCHKALHRGEITLKAKRGQSFRAQAFMGIMRREVLNRLKASYPELKVHETYGYLTKHARIANGIVKSHGADAFCIAGNLGAERLGEFFFQKQTRRNNRQIHKLSILKGGIRKRNQAPFEAKGFRLFDKVACQGEEGFIFGRRSSGSFDVRKLDGTRISAGISCKKLHLLEKRRTYLTEIRKEEALPPLPEGRGLRA

SEQ ID NO: 20599 - protein, 417 aa, unidentified
LRVFVLNMRGKPLMPSSPRKARTLLKTGKARVVKRTPFTIQLNYPTGEAKQAISFGVDAGSKHIGLSATTDKEILFEAEVELRNDIVELLATRRQHRRNRRYRKTRYRKPRFRNRNKPKGWLAPSIQNKIELHLKAVSMAYKILPITHTIIEVASFDIQKIKNPDISGKEYQEGDQLGFWNIREYVLWRDGHKCHGRKGCKNKILNVHHIESRKTGGDSPKNLITLCEKCHADYHAGRLKLNLKRGQSFKDAAFMGIMRWTVYNRLKTLYPNVSLTYGYITKNTRIRNGLEKTHTVDARCISGNPLAKPDDVCYYFKQVRKQNRQLHKANTLKGGIRKINKAPKYVHGYQLFDKVLYKNKECFIFGRRSSGYFDLRTLDGVKIHVSANYKKLRLLERAKSIKCERREGNSSPTYAIA

SEQ ID NO: 20600 - protein, 393 aa, unidentified; identical to SEQ ID NO: 10946

SEQ ID NO: 20601 - protein, 420 aa, unidentified
MQYVYVLNKHGEPLMPCSPRKARLLLKQKKAYVIKRTPFTVKLLYGSAGYKQPVTLGVDAGSKHIGISATTEKYELYREEATPRNDVVDLLSARRAFRRSRRNRKTRYRAPRFDNRVHSKHEGWLAPSVEVKIREHITLIKRVCRILPITLVRVETAEFDTQRLKAMLEGKPLPVGTDYQLGEMYDEYNVRQYVLKRDNYTCQCCGAHPTKTKAVKLHVHHIETRRTGGNAPNNLITLCTVCHKALHAEKVTLDGKKRGKPLKDAAFMSIMRKTLMERLRKELKIPVQGTYGYITKYLREKYGILKSHTNDARCISKNPLAIPCDTCYYTKAVRHHNRQLHKATILKGGIRKANQAPYIVKGYRLWDKVAYNGTECFITGRRTSGYFALKELDGTVVSNSISYKKLRLLEAATNYIIERK

SEQ ID NO: 20602 - protein, 414 aa, unidentified
MVYVINKQGQALMPTERFGKVRRLLKNSLAHVMCRIPFTIQLDYDTTDYTQPVSLGIDAGSKHIGISVTTSEKELYAADVELRNDIVDKLSTRRELRRTRRSRLRYRKARFNNRVSSKRKGWLAPSVENKIQTHLTVVEKIHKFLPITNIVVETASFDIQKINNPSISGSEYQQGEQLDFFNVREYVLFRDNHTCQHCKGKSKDKVLNVHHIESRKTGGDSPKNLITLCETCHKAYHRGEFELNVKRGRSFRDAAFMGIMRWSFYDRLKNIYPNVSMTFGYITKNTRITNNLPKEHYVDARCISGNPVAKPLGYYFYQKKVRCQNRQIHKANFLKGGKKKLNQAPFLVKGFRLFDLVEYQKELYYIFSRRNSGYFDIRKLDGTKVNKGSINCKHLRLIDTRKSILIEKRTKVNL

SEQ ID NO: 20603 - protein, 423 aa, unidentified; identical to SEQ ID NO: 12430

SEQ ID NO: 20604 - protein, 424 aa, unidentified; identical to SEQ ID NO: 5075

SEQ ID NO: 20605 - protein, 397 aa, unidentified
IVKRRTPFTIQLTIATGESKQPVTLGVDAGYKHVGLSASTEKAELYASEVELRQDVSDLLSARRALRQSRRNRKTRYRAPRFNNRLRTKRKGWLAPSVKNRINAHLSRIEAVLRLLPVTKISVETASFDMQLLKNPDIAGKEYPEGEQLGFWNVREYVLFRDRHVCQHCYGRSKDPVLNVHHLESRRTGGDSPGNLITLCETCHKALHRGDITLKAKRGKSFRAEAFMGIMRWEVHNRLRALHPGIEVSNTYGYRTKHARIANGIAKSHCADAFCIAGNLGAERLCEFFFQKQTRRNHRQIHKLSILKGGIRKRNQAPFEVKGFRLFDKVACQGEEGFIFGRRSSGFFDVRKLDGTRISAGISCKKLHLLEKRRTYLTEIRKEEALPPLPEGRGLRA

SEQ ID NO: 20606 - protein, 415 aa, unidentified; identical to SEQ ID NO: 3582

SEQ ID NO: 20607 - protein, 517 aa, unidentified
MLPQSRALEAADADNREGQDETVGGKGAIPKPVANISEGRRFARSALRPQGQCNVRFDEGFVQVFVLDKKKKPLMPCHPARARELLREGRAVVHRIAPFTIRLKDRIGGETQPIRVKLDPGSKTTGLAVVREEETDGEKTAHVLFQAEIHHRGSAIKKRLDQRRAFRRRRRSQLRYRTPRFDNRTRPDGWLPPSLRHRVDTTLAWVERLRRLVPVSELSQELVRFDMQKIENPEISGVEYQQGTLAGYEVREYLLEKWGRTCAYCGASDMPLEIDHIHPRSLGGSDRVSNLTLACRSCNLKKGNRPVGEFLAKTPERLSTILARAKAPLKDAAAVNTTRWALFQALKATGLPVETASGGRTKWNRTRLVLPKTHALDAACVGKVDRIEGWNRPCLSIKSTGRGSYRRTRLDAFGFPRGSLTRTKAHFGFQTGDRVMAIVTKGKKTGTYAGRVAVRSSGSFNIQTGSGVVQGISYKDCRLLQRADGYGYSIHPITEKGEAGEALSLPGMNAGVSRARG

SEQ ID NO: 20608 - protein, 430 aa, unidentified
MPKVYVLNRHGRPLMPCTPAKARHLLDAGKAKVRHRTPFTIQLLYGSTGYTQEVILGVDAGSKTIGLSAATETEELFSAEVKPRNDVVELMSARRQFRRARRNRTTRYRKPRFDNRVRSKHKGWLAPSVEVKIQEHMTAIRRACAILPVSKVVVETAEFDLQLLKAVAEGKPVPQGEDYQKGEMYGHYNVRQYVLWRDSYTCRICGVHGSVRKGVPLHVHHLESRRVGGDAPDNLVTLCTACHDKLHKGIIMVADIKKRKRRSTRDTTFMGIMRMTLLRRLREQLPVPVVETRGYITKATRENLLVLPKSHTNDALAIAHGPQGFRAEYLPNIRQADRLYTIRPVRHHNRQLHKATILKGGVRKANQAEKYICGFRLYDKVLYNGIECFVWGRRTSGSFLLRQLNGEKVKDGVSYKHLKLLERSQSYLVA

SEQ ID NO: 20609 - protein, 425 aa, unidentified
MENTLKVFVLNMRGQPLMPCSPPKARKLLRAGKAVPVRRTPFVIQLTVPTGETKQPITLGVDAGYKHVGLSATTAKEELLASEVELRQDVTGLLSNRLALRRARRNRKTRYRAPRFDNRVRSKHKGWLAPSVENRIQAHISRIEAVCRVLPITKIVIETASFDIQKIKNPEVEGTDYQQGEQLGFWNVREYVLFRDGHVCQACKGRSKDLILNVHHIESRKTGGDAPGNLITLCEACHKAYHAGKLKQFSPRRGASFRAETFMGIMRWTVLNRLRERHPELPVTNTYGYLTKHKRIVAGLPKTHCADAFCIAGVLDAKRRGEYLFQKQTRRHNRQIHKLTILKGGVRKRHQAPYLVHGFRLFDKVLCKGEVGFIFGRRSSGAFDVRRLDGTKISAGISYKKLSLLEKRKMFLTELRKEGRDSSRV

SEQ ID NO: 20610 - protein, 408 aa, unidentified; identical to SEQ ID NO: 4142

SEQ ID NO: 20611 - protein, 434 aa, Anoxybacillus sp.
MVFVLDTNKCPLAPCHEAVARKLLKQGKAAIYKRFPFTIILKKSVDESENETTYRLKIDYGSRHTGLAILRGQEVVWLGQLDHRTDIKERIDKRRAFRRARRNRKTRYRKPRFLNRKRKEGWLPPSLESRVQNIQTWVSRLKKLCPIGHISYENAKFDTQLMRNPEISGIEYQQGTLQGYEVREYLLEKFGRKCCYCGKENVPLEVEHIIPKSRGGTDRIDNLCLACRDCNQRKGNQTAEEFGCPHIQKQVKESLKDTSIINATRWKVYEVLKQARLDVECGTGARTKMNRIRLGLPKTHYFDACCVGESTTNHLYFKTKEVLFIKAKGRGSRSRTNLDRYGFPRGYLARQKFFFGFQTGDMVKAIVPRGKYKGVWFGEVACRKTGNFDIKGKDGKRIAQGISYKYIQVIQRFDGYTYRKEEAELAQGAIPPRA

SEQ ID NO: 20612 - protein, 411 aa, unidentified; identical to SEQ ID NO: 13760

SEQ ID NO: 20613 - protein, 335 aa, unidentified
LISTRRQNRRSRRNRKIRYRKARFQNRVSDKKDWLAPSIRQKVDTHMTVVSRVCKILPVTKIIVETASFDIQKIKDPDISGTGYQHGEQLDFWNVREYVLFRDGHTCQCCKGKSKDPVLNVHHIESRKTGGDAPNNLITLCETCHKGYHSGAVQLPKAIHRGMRFKDAAFMGIMRWAFYNKLKEVYEPQDIEVSMTFGYLTKNTRIRHYLPKEHYIDARCISGHPEAIPSNEVFYQKKVRCHNRQIHKNTILKGGVRKRNQAGYLVKGFRLFDKVAYKGREYFIFGRRQSGFFDLRNLSGCKVNKGSLSYRKIGFLEPRQYYLCERRVMDTQGCA

SEQ ID NO: 20614 - protein, 494 aa, unidentified
MTMVYVLNKDGKPLMVTTRGGRVRYLLKEKKARVVSSTPFTIQLNYDTPDITQDLILGIDPGRTNIGVAVVKEDGSCVFSAHLETRNKEVPLLMKKRAAFRRNHRTLDRRRKRQRRAKSAGTIVENESIERLLPGYEKPVVCHYIRNKEARFNNRKRPQGWLTPTANHLLQTHINLIAKIAKFLPITKVVVELNRFAFMAMDNPNIRRWEYQQGSLYGLGSVEDAVYAQQNGHCLFCKTPIDHYHHVVPRHKNGSETLANRCGLCAKHHDLVHQDKAWADKLVTRKEGMNKKYHALSVLNQIIPFLMEYLGSETLYDVYATDGRSTKCFRVAKSVPKEHYTDAYCIACSILNTDIEVSAPVEPFELKQFRRHDRQACHQQRIERKYYLDGKQVATNRRKAIEQKSDSLEEFREAYGDAAVSQLTVKPHPPQYKDMTRIMPGAVMDFDGNVGVLQGADGFHNGKPDYYSSTKREKVRARRCTLLARNAGMVFIPV

SEQ ID NO: 20615 - protein, 430 aa, Vibrio sp.; identical to SEQ ID NO: 8414

SEQ ID NO: 20616 - protein, 415 aa, unidentified; identical to SEQ ID NO: 11876

SEQ ID NO: 20617 - protein, 494 aa, unidentified; identical to SEQ ID NO: 5675

SEQ ID NO: 20618 - protein, 465 aa, unidentified; identical to SEQ ID NO: 8068

SEQ ID NO: 20619 - protein, 422 aa, unidentified; identical to SEQ ID NO: 11357

SEQ ID NO: 20620 - protein, 396 aa, unidentified; identical to SEQ ID NO: 9891

SEQ ID NO: 20621 - protein, 279 aa, unidentified
VVVETAEFDLQLLKAIADGKPVPQGEDYQKGEMYGHYNVRQYVLWRDDYTCQCCGAHATKKKEVRLHVHHLESRKVGGDAPDNQVTLCESCHEKLHKGLIAEKDFKKRKRRSTRDATFMGIMRKTLMQRLYSELPIPVIETRGYITKATREKLLVLPKSHTNDALAIAQGKRGFNVGYLPEIAQIDKIYTIRPVRHHNRQLHKAAILKGGIRKSNQAGKYVFGYRLFDKVQFNGQDCFIWGRRTTGIFTIKTINGKMIKDGISFKKLKPVEKSTSYLIA

SEQ ID NO: 20622 - protein, 426 aa, unidentified
MRVFVLDSNKKPLNPCHPGKARKLLNQGKASMFKRYPFTIILKEEKPNHVNNKFELKIDPGSRTTGLAILSANNLIWAALLNHRGLQIKDSLLSRKQIRRSRRNRKTRYRQPRFLNRKKPKGWLAPSLMSRVHNIITWVKRLTKLCPINKIAQELVRFDTQKINNPEISGIEYQQGTLFNYEIREYLLEKWGRRCAYCGIQNVPLEIEHIIPKSKSGTNSVNNLTLACRKCNLAKGNQDIKDFLSNKPSILNRILKQCKQTLKDATAVNSTRWKLFNSLKEFNLEIETGTGGMTKYNRTKQGLEKTHWLDATCVGKSTPEKIKVEVIKPLIITATGRGSRQMVKPDKYGFPRTSPKLRQKQFFGFQTGDIVKAVVTKGKKVGTYVGRVAVRKTGSFNIKTAFSTVQGINYKYCKPIHKADGYSYAT

SEQ ID NO: 20623 - protein, 544 aa, unidentified
MKQKKQKVMVYILNKKGKPLMPTTRCGHVRKLLDSKKAVVVNSNPFTIRLKYDTPNGVQDVFAGIDSGRENIGSGVSNEDGDCLYLGELRTSNKSIKMKMTERVGFRRERRKHDRQNKQRKARKDHTEIQNGKDDICRATISCKSVQISYPTAEESVTHKIIRGKEGKFANRHRDGDWITPSARQLVQMHMNDLKSICKILPISHVTLERVAFDFQKLENENIKAWEYGKGKLYGYDSPEEYIHDVQDGKCLVCGKPHIDYLHHIIPRSKGGSDKVSNIAGLCYDCHYGPIGVHNCQDTQDRLPELKNEVNKQYKVSLLNSVMPVLIEEIDKFCKANSIMFSICEGHDTAKVRDMYDLQKDHCLDGFAISLVGRNVKSVDVMPDRIHQKQRYKKKSKNIIQKRNYREYYDDKKLVAINRHKGTDQKADSLEEYMNTYAETHTADECKMHFESLTVKPARRTYTFHKEGRICPLHIGDKVRYEKKNKIKGNTKVDTFICEGIYFSKDENKAKVEHNKTKSKKMKFCRAIESGCIPYIDYIKLALI

SEQ ID NO: 20624 - protein, 490 aa, unidentified
MYVVYVLNRQGKPLMPTKRFGHVRRMLKTGKAKAISTKPFVIQLQYESTDFVQPLYGGTDPGRTNIGEAVLNNKGEVVYAAHVITRNKEIPKLMADRATHRRASRRGERLRRKRRAKANGTMTCFPEGRKLPGYKDGVLELKDIFNTESRFNNRKRPAGWLTPTARQCIQTHLNMVQNICKILPVTDWTLEYNRFAFMQLEDGSVRGWGFQNGRLKGYANKEDYIYALQGGVCICCGAPIEHYHHIKPRHKGGSNTPENLVGLCSVCHAEIHTGKRNLDKIGKYKKYAGTSIVNIAIPFIWDGIVKMFGNKAHICEGQETAELRRANNISKEHFTDAVCIAGIGLDITPQYDNNQPFELRQFRCHDRSYIKAQVERTYMDGKTIVAKNRKPRFGQKGDALSDLQSKITEEHGELAARRAVSKLVVKKSYRRYNALERIKPSAVFMFSNKKYLLSGQLTNGMYYRAFGKGTKNFSSINCEVISSGYSLTYM

SEQ ID NO: 20625 - protein, 462 aa, unidentified
MSVLVIGRNGRALMPTNPRKARLLLKKKTASVVCRHPFTIQLLYKTGCATQEGCIGIDTGSQHIGVGITCGDRVILKDEHALRSSMEKRSLLATRTVMRRGRRYRKVRYRKPKWRHHTKRMYFEKANRRGQHWRKVKTTTQSPRSKGWLPPSLQSKCDHHFRIIDRYLKYLPDPITRNLVIEAGRFDMARMNDPTIHGEMYQRGPMYDAENLRAYIFARDNYQCACCKAKAGTTRKADGTTVKLVAHHILFRSRGATDNPKYIISVCDHCHTTKAHQPGGILYSWMENNKKVARGLRDATFMNILRKRLFARYPQAAFTYGNITAADRKQLRLPKSHANDAVAISLFGKEASTVKNICQTMHYKQIRKSKRSLHEAIPRKGRKNPNTKAVRNKKNTTQANGFKLWDSVLADGKKLFICSFTGTSAYLIDKNGCYISQPGKTYKQWPLSKLKRLHPNGNWLMA

SEQ ID NO: 20626 - protein, 512 aa, Ruminococcus sp.; identical to SEQ ID NO: 9174
  VARIANT 512: note = X can be any naturally occurring amino acid

SEQ ID NO: 20627 - protein, 426 aa, unidentified
LAKDHYRSIDREETNLRVYVLNKRGEPLMPCSSAKARILLKEKKAVVKRRTPFTIQLTIATGETTQPVTLGVDAGYKHVGLSASTKKAELYASEIELRQDVSELLAGRSALRHARRSRKTRHRAPRFDNRKRDKGWLAPSVENRIGAHVSRVEAVLRILPVTKIIVETASFDVQRLKNPDIQGVEYQQGEQLGFWNVREYVLFRDGHECQHCHGKSKDKVLNVHHIESRRTGGDAPNNLITLCETCHKAFHRGEIELRVKRGRSFQAETFMGVMRWTFFERLRARHSEIEVRNTFGYLTKNTRITHGIEKTHCADAFCIAGNLKAKRLGYYFFQKQTRRHNRQIHKLTILKGGARKRHQTPYEIKGFRLYDKVLFQGKTAFIFGRRSSGYFDIRTLDGERISASVSYKKLRLLEKRRTYLIELRRN

SEQ ID NO: 20628 - protein, 432 aa, unidentified
MVYVLDITGSPLMPTERHGKVRRMLRDGKAKVVKKNPFTIQLKYETTNYTQPITLGVDSGSKHIGLSASTKKKELYVADVQLRTDIVDKISSRREARKTRRNRKTRYRKVRFQNRIKSKHKGWLAPSVGQKIQCHLKQVEDVHKILPVRKIVIETASFDLQKIQNPDIHGVEYQHGPQFGFWNVREYILFRDNHTCQHCHGKKKDPILNVHHIESRKTGGDSPNNLITLCETCHKKYHSLSSEKQKMWKLKRGRSLKDASFMGVMRRTFYERLKEMYPKIEVQQTFGYITKNNRIRLGLKKEHYNDAYCIAGNFDARPLTSVLFKKKVRRHNRQIHKFNTVKGGKRKLNQTPYLVKGFRLFDKVEYQGQECFISGRRASGSFALKTFDWEKVSDGVTFKKLKLLEKRSGYITARKERAFLQRLKPLVSSPEK

SEQ ID NO: 20629 - protein, 434 aa, unidentified
VPYMVYVLDIDGQPLMPTSRHGKVRRLLNSHLAKVVKRCPFTIQLLYQSTKETQPVSLGVDAGSRHIGLSATTEREVVYQEELVPRNDIVKLLSARRALRRSRRNRKTRYRRVRFNNRVHSKHKGWLAPSVEVKIQEHITATKRICQILPIFDIHVETAEFDLQRLKAMEEGRLLPAGTDYQLGEQYDFYNTRQYVLHRDEYTCQCCGTHDNNVKLHVHHVESRQTGGEAPNNLITLCEHCHKSIHAGKMMLPKGKKRGKSYRDAAFMGIMRNTLLERLRKEVNVPVTMTYGYITKYWREKAGLEKSHINDAICISKHPYARPLETYYLTKAVRHHNRQIHKTKFSKGGIRKRNQAPYLVKGFRLFDKVLYQGESYFIFGRRITGYFDIRTLDGTKVNKGSTSYKKLRIQDTAEAYLTEVRAIPHMNEFTCVLA

SEQ ID NO: 20630 - protein, 413 aa, unidentified
MTSYAFVLDANGKQLAPTKEQKAWFLIRKKRAALVSKYPMVIQLKKEIQENEICKDEIRCGIDDGGLHVGIALVQKCKTKNKVVFKGTIEQRNDVKHLMEVRRGYRRYHRYHKRYRQARFNNRKSSKREGRIAPSILQKRQATIRVINQLNKWINITNYWLEDVSIDIRVLTDGYKSYRWQYQKSNRLDENIRKSTILRDGGKCMECGKSNCRLEVHHIKPKRRNGSNTLDNLITLCESCHQKTEGQEELYMDRYFSLLKSSDNKNLNYAQHVMIGKMWLRKQLSGLGVLYLTSGGDTANKRIDWNIEKSHANDAVCITDLQPDTYDMKEWTMKPMRRQSKAKTDHVLGIKHRDLVEYTFKNGETHRGYVTALYPEQKAINFQSPTKHCKKVNARKCKLLWKYSKIYWFENAS

SEQ ID NO: 20631 - protein, 420 aa, unidentified
TISPVYRGFARYKGLNTGKEKKAIVVRRTPFTIQLTIATGEAKQPVSLGVDAGYKHVGLSASTEKAELYASEIELRQDITDLLSARRELRRARRNRKTRYRAPRFDNRIHTKRKGWLAPSVENRINAHLSRIEAVLRLLPVTKITVETASFDMQLLKNPDISGKEYQEGEQLGFWNVREYVLFRDGHVCQHCHGRSKDPVLNVHHLESRRTGGDSPGNLITLCETCHKALHRGEITLKAKRGQSFRAEAFMGIMRWEVLNRLKASHPELEVNNTYGYRTKHARISNGIAKSHCADAFCIAGYLGAKRLGKFFFQKQTRRNNRQIHKLSILKHGLRKRNQAPFEIKGFRLFDKVASKGEEGFIFGRRSSGYFDVRKLDGTRISAGISYKKLHLLEKRQTYITEIRKEKALPPLPEGRGLRA

SEQ ID NO: 20632 - protein, 414 aa, unidentified
MPCSPAKARLLLKEKKAVVVRRTPFTLQLTIATGEAKQAVSLGVDAGYKHVGLSASTKKAELYASEVELRQDITDLLSARRALRRARRNRKTRYRAPRFDNRIRTKRKSWLAPSVENRINAHLSRIEAVLRLLPVTKITVETASFDTQLLKNPDIAGKEYQEGEQLGFWNVREYVLFRDGHVCQHCHGRSKDPVLNVHHLESRRTGGDSPGNLITLCETCHKALHRSEITLKAKRGQSFRAESFMGIMRWEVLNRLKASHSELEVHNTYGYRTKHARIANGIDKSHCADAFCIAGNLGAQRLGEFFFQKQTRRNNRQIHKLSILKHGLRKRNQAPFEIKGFRLFDKVACKGEEGFIFGRRSSGFFDVRKLDGTRISAGISCKKLHLLEKRRTYLTEIRKEEALPALPEGRGLRA

SEQ ID NO: 20633 - protein, 481 aa, unidentified
MWTTVLRDEKPYGRSSALPARECVSIAKKRRHRMVAVLSKTGIRLMPTSSYRARKLLAKKKAVICGYCPFTIRLTERETGDVQPVELAVDTGYFHVGNSLKTAKHELAAVEIRTLMDEKQRYDDRRRYRRMRRSRLRYRAPRFDNRRRPEGWLAPSIQGRMEQNLAFLRRVLSVVPVTRIVMEMGQFDTQVLKAVEEGRPLPEGTDYQQGERYGIATLREAVFTRDNYTCQCCEKTVHDGVILHVHHIVYRSQGGTNRMGNLITVCEKCHTPKNHKPGGKLYKWKPTVKSFKGATFMTAVRWIVYRSVKESFPDVDVRITYGAKTKLQRRTLDITKSHVNDAYVMGDFHPKHRASPVILQKKRRNNRILEKFYDAKYIDTRDGSKKTGQQLFNGRTNRNHNTDTENLRPYRGTKLSKGKRAIRTTRYRIQPHDILVYQGQEMEASGCHCKGTRVMTTAKKSLPIGKVRVRRYSGGYYAVAE

SEQ ID NO: 20634 - protein, 408 aa, unidentified; identical to SEQ ID NO: 4810

SEQ ID NO: 20635 - protein, 453 aa, Erysipelotrichaceae sp.; identical to SEQ ID NO: 6443

SEQ ID NO: 20636 - protein, 442 aa, unidentified; identical to SEQ ID NO: 2903

SEQ ID NO: 20637 - protein, 423 aa, Arthrospira sp.; identical to SEQ ID NO: 5825
  VARIANT 22: note = X can be any naturally occurring amino acid
  VARIANT 29: note = X can be any naturally occurring amino acid
  VARIANT 151: note = X can be any naturally occurring amino acid
  VARIANT 153: note = X can be any naturally occurring amino acid
  VARIANT 178: note = X can be any naturally occurring amino acid
  VARIANT 210: note = X can be any naturally occurring amino acid

SEQ ID NO: 20638 - protein, 535 aa, unidentified; identical to SEQ ID NO: 6116

SEQ ID NO: 20639 - protein, 295 aa, unidentified
  source 1..295: note = Clostridia bacterium
LAGAICGGQDPGAYHQYQAGFELLPIGKVVVETAEFDLQLLKSIADGMPVPQGENYQKGEMYGFYNVRQYFFSRDGYPCQCCGAHGKGIKFHTHHLESRKTGGNAPDDLVTVCDKCHKAFHAGLITDAKLKKRRRKSTRDAAFMGIMRKTLLQRLRAELPIPVVETRGYITKATRERLLKLPKSHTNDALAIAMGRHGFGIKEVTYMPQSDRIYQIKPVRHHNRQLHKALPKKGGRRQRSQGPKYVQGFRRFDKVLYRGQECFIWGLRTRGYFQLKLLNGTKVHESAKASELILL

SEQ ID NO: 20640 - protein, 378 aa, unidentified
VGSEMCIRDSAGSKTIGLSASTETEELFAAEVTPRNDVVDNLSTRREFRRSRRNRKTRYREPRFNNRVRSKHKGWLAPSVEVKIQEHITAVKRVCALLPVGKIVVETAEFDLQLLKAVEAGLPVPRGEDYQKGEMLGHYNIRQYVLWRDGYTCRCCGTHGKGVKFHVHHLESRKTGGNAPDNLVTLCDGCHKKFHKGIITPDILKKRKCRSTRDAAFMGIMRKTLMERLRAELAIQVVETKGYITKYTRVELLKLDKTHTNDALAIAQGRRGFGVEELTTIPQSDYIYRIRPVRHHNRQLHKATILPGGIRKSNQAPRYVRGFRLFDKVSYLGEDCFIWGRRSSGSFLLKLLDGTKVKDGVGYKRISLLERSASYLIS

SEQ ID NO: 20641 - protein, 372 aa, Aphanizomenon sp.; identical to SEQ ID NO: 5678

SEQ ID NO: 20642 - protein, 421 aa, unidentified
MVFVLSRDKTPLAPTHEAKARKLLKQGKAVVHKIFPFTIRLKEKKESDKQFDIKFDVGASVTGVAIVDAVKCFFFAEIVHRGKVIKKAMDSRRAIRRGRRARKTRYREARFDNRTRPNGWLPPSVKSRADNVINFAKKYVKLIPLKKAIVEKVSFDTSSMTNGKKLYGDEYQNGELKDTKLRDFIFKKYNYKCVYCGGVGEEIEHIIPRSKGGTNSIQNLTLSCRKCNIEKGNLSLKDFGKKVKKDFSHIEPRKTPKNASIIQSARTYTLKELAKNFEVETGEGWETYANRKELKLPKEHYYDAMCIGDNYKYKIVTQRVLEVKAQGRGNRQMCRMDKFGFPRTKAKGSKIIKGFQTGDIVKAVVTKGKKIGTYLGKVAVRASGNFNITTTEATIQGINYRYCTTIQKGDGYAYATRTINQ

SEQ ID NO: 20643 - protein, 460 aa, unidentified
MVAVVDLFGKPLMPTNEYRARKLLKQKKAKIFGYRPFTIQLTERKSAEIQPIELCMDTGYIHIGISAKSERHEYLGMQIDTLTDEKLKHDDKRQYRRQRRNRKRYRAPRFDNRRRKEGWIAPSLEHKKEIHIDAIQRICKVMPITDITLEMGNFDTQVLKAVEEGKPLPQGSDYQHGERYGIATLREAVFLRDGYKCQCCEKSVKDGAILHVHHIKYRSQGGTNRMSNLITVCDKCHTQKNHKPGGKLWNWKPKLAEFKGASYMTSIRWMLYNEVTALLPNRSIHITYGAKTKESRRKLDIKKSHVNDAYVMGLFCPKHRTKPVYFKKKRRNNRVLERFYDAKYIDGRDGKKRSGQELFNGRINRNHRKDSENLHLYRKQKVTKGKRSIRNKHYPIQPHDILLYQKKKYENAGCHNNGSRVILLPEKKSVALKQLTMYQYAGGYYRVPYESNKKEERMSS

SEQ ID NO: 20644 - protein, 465 aa, Nocardiopsis sp.; identical to SEQ ID NO: 19742

SEQ ID NO: 20645 - protein, 438 aa, unidentified
MRVCVVNQQGRPLMPTSPRKARLLLQAGKAEIVERTPFTIRLLYGTRGYTQPITLGVDAGYATGGFSAVTEKEELVRGELKLLAGMSERLAERAMYRSGRRRRTRHRKPRFDNRRRPGGWLAPSIQHKLDSHLRLIARLCAALPITHVVIEVASFDIQRLKDPDIEGVGYQQSEQAGFWNLREYILHRDGHTCQNPACPNRAKKILQVHHLGYWRGDGSDRPANLITLCTRCHTPENHQPGGFLWGWQPRLQSFRPETFMTLVRWRLVEALGAEATYGYVTKSRRIELELPKSHSNDAFVIAGGSSQARAEPLLLEQVRRNRRALQVWYDAKYVDARTGEVVKAQVLNNGRRTRNRNLSGENLRRYRGQKVSKGRISIRRQRYPYQPGDLVRYEGQIYRVQGMGGYGRNVKLAGQSKEVRASLVSPVCWRKGICRQVP

SEQ ID NO: 20646 - protein, 536 aa, unidentified
VLRPRYQYPTRWYPSREQGSGNGCLSGEENTDLEQEVSGTLSKGDHSHPGEQDFCVPAITIQGGPAMSVFVVGLNGCRLMPTSERKARLLLKHGKASVYRKVPFTIKLNYKTGSTTQSGYLGIDTGSQHIGVSVVREDGTVLHKEEIGLRDSMSKRKLMQSRASSRRGRRHRKTRYRHPKWRPKAKRVYCEIPDRKGRHWKKKEITFASKRAKGWLPPSLQSKTDHHIRWIKKLQDLLPEGYRLSIELGRFDPARLKDPEIHGELYQKGPQYDYENVRAYVLNRDRYTCQVCGKKGGKLHVHHILYRSHGATDDPQYMATVCSDCHNTENHQQGGILYQWMQKQKKFTRGLRDATFMNILRKRLIEAFPGATFTYGNITKADRERLRLPKSHGNDATAIAIVKTGIMTVKDKEPVIYIQQVRRKKRSLHEETPRKGRKEPNRKASRYDKNTKAVTVTKRKNKKKITITGCLFDRVELNGKKGWISGFTDKSCYVKDENDQYIRTSPKYKQVSLSKLKILHHCGNWAIGARQSLGKG

SEQ ID NO: 20647 - protein, 413 aa, unidentified; identical to SEQ ID NO: 11958

SEQ ID NO: 20648 - protein, 512 aa, unidentified
MSTVYVLNKDGKPLMPTTRGGHVRHLLKEQKARVVRTNPFTIQLLYETDNLVQPLYLGIDPGRTNIGVAVVKTDGTAVFTAHLETRNKEIPKLMKKRKDSRRARRTNGRRCRRQRRAKANGTISKKCVKQTTAQNGSVSKRAKEIGVIKRHLPGCEKEVLCISIKNKEAKFSNRVRPEGWLTPTANQLLQTHINLVKKIQKFLPISDVVLEVNKFAFMQLDNPNVQKWQYQQGPLYQKASLEEAVSEMQEHHCLFCKNTIDHYHHVVPQHKNGSNTIGNIVGLCAKHHDLVHKDTSWQEKLAKKKTGLNKRYGALSVLNQIIPALTKELSSLFPKHFFATNGKSTYDYRAAHGVSKDHWLDAYCIAGSVLPNDVCDNNINNHVPYELKQFRRHDRRALHKENMGRVYTLNGKSVATNRHKAIKQTTDSLEEFRQRQPNDVCKLKVKEHHPEYRNPKRSFPGCVFLVGKQTHVMQGTSGSHNGKADGYYDTNGNSYSSGKCKFVAKNEGIVFA

SEQ ID NO: 20649 - protein, 419 aa, Moorena sp.
MQNYVFIIDTNKRPLNPISPKKARRLLKKGKAAVFRMYPFTIILKTAIDDPTISPCQIKIDPGSKVTGFALVQNGQVIWGMELEHRGGLIKKKLESRRAVRSGRRNRHTRYRKPRFLNRRRPQGWLPPSLEHRILTTQTWVKRLIKFCPVNEIWVERVKFDTQKMQNPEISGVEYQQGELAGYEVREYLLEKWERECTYCGKQNVPLQIEHIHPKSKGGSDCVSNLCLACKKCNQRKGNKPIEDFLKKKPSLLQKIKTKAKQPLKDAAAVNATRKKLVKMLQSVRPVVTGTGAQTKYNRTKLGLPKQHWIDAACVGDIETLTLITSQPLLVTCFGQGGRQKAALNKYGYPIRHNPLKPIKGWVTGDIAKHQKLGIGKVTPRSKGSFGFTPLGMKGYKSCKPQDISAIHRKDGYTYGFYQ

SEQ ID NO: 20650 - protein, 490 aa, unidentified
  source 1..490: note = Competibacteraceae bacterium UBA4410
MGEGSEQQCSVTRCVSTFEFWRRNVAVFVLDRHKKPLMPCSEKRARKLLEKGRARVHRLMPFSIRLVDRTVNDSVLQPVTLKLDPGSKATGIAVVRESETIDEETGEIKTTVYVLTLFELQHRGKQISESLTARRQMRRRRRGNLRYRAPRFLNRTKPKGWLAPSLQHRVDTVSAWVQRFQRLAPITGIAQELVRFDLQQMENPEISGVEYQQGTLHGFETKEYLLEKWNRECAYCGTKNIPLQVEHIQPKANGGSHRVSNLTLACQPCNQKKGAQAIEIFLAKAPKRLAKIKAQVKRPLKDASAVNSTRWALFNALKATGLPILTGSGGRTKFNRSTLGIPKDHALDAACVGIMEAIHHWDKPALAIKATGRGSYQRTRLNAFGFPRGYLTRQKRIKGFQTGDMVKAEVPTGKKIGSYRGRVAVRASGSFNIQTATGLIQGISHRYCKVTQRADGYGYSQQLNPKEVALAGDPLSLPALKGGVSRGKSR

SEQ ID NO: 20651 - protein, 427 aa, unidentified; identical to SEQ ID NO: 8384

SEQ ID NO: 20652 - protein, 439 aa, unidentified
MSVFVLDKHGKPLMPCSEKRARLLLSRHRARVHRLVPFVIRLTDIRLQDVSLQPLQVKLDPGSKTTGVAVVRVAEPEGIGRSVSVLFLMELIHRGRQISESLTARRAMRRRRRGQLRYRAPRFNNRTKPKGWLAPSLRHRVETTINWVARLRRWAPVTGLVSELVRFDMQVMENPDISGVEYQQGTLSGYEVREYLLEKWGRSCAYCSKKEVPLQIEHVVPKARGGSNRISNLTLACGPCNTKKGARSIEEFVKDSATLKRILAKLKAPLRDAAAVNSTRWALLNELKKTGLPVESASGGRTKFNRSQLGIPKTHALDAVCVGKIDAVIDWRRPTLTVTCMGRGTYQRAKLNKFGFPRGYSIREKRIKGFQTGDIVLAMVPASSKKAGQYIGRVAIRKTGSFNIQAGGNVIEGISHKYCQLIQRGDGYRYHQSQTKIAN

SEQ ID NO: 20653 - protein, 522 aa, unidentified
MATDFIYVLDTDGTPLAPTHRHKHTRMLLKTRQAKVVCYRPYTIQLLYESETPRVVPQLIAGQDPGRTNQGTNVIDRTGKSVYAAHIETRNKEIPTLMKNRSANRRASRNGERARRIRKAKLHHTTFQYGDHNRKLPKCNETVPIHYIINTEAKFCCRTRSDGWLTPTANQLLQTHISEVKQLMKILPITDFVIELNKFDFAKLKDPTLQKWQYGKGSLYQTNLKDLIDEEQDHHCLLCKNPIEHYHHIVHKADNGSDTVENMVGLCKKCHTRVHKNQKVEEKVLSKKEGLEKKFAGTSILNQIFKPYITWLIKTFGEDHVFITDGKTTAKFRNDYNVPKTHELDAYCIACSILENPIINYDCVVFEEKQFRHHNRQLINSTRERKYYHVDRVQTTKTLKNGKQVVKTELKNKTLVATNRKKRMDQKTDSLREYHMKLRQKYDKQTVKKMISELVVVKSTRGYRDQNTIMPGAVFMYHGKHYVLSGTSNQGQYFRAVGQGKTNFPTKDCKIVRKNTGLVYLY

SEQ ID NO: 20654 - protein, 457 aa, unidentified; identical to SEQ ID NO: 19263

SEQ ID NO: 20655 - protein, 420 aa, unidentified; identical to SEQ ID NO: 2681

SEQ ID NO: 20656 - protein, 414 aa, unidentified; identical to SEQ ID NO: 4264

SEQ ID NO: 20657 - protein, 430 aa, unidentified
MSNFVFVLDTNKQPLEPVTPGLARRMLNQGKAAVYKRYPFTIILNYSCDKPLTKSHEIKIDPGSKTTGLAVLQGDKIIWAAELVHRGNHITCDLASRSAIRRNRRNRKTRYRQPRFLNRTRTPGWLPPSLASRVSNIVTWVNRLRRYVPVTAISQELVKFDTQAMQFPEISGIEYTQGELAGYEIRQYLLEKWGRKCAYCGIKNTPLEVEHIHPKSKGGSSRVSNLTLACRNCNLAKGNRDITDFLSGKPDILSRVLKFACLPLKDAAAVNSTRRALFEKLQQTGLPVTTGTGGQTQYNRTRMGLPKTHWLDAACVGKVEQLAVLSRQPLLITAKGWGNRQMCTPNKYGFPSKHRTRCKTFFGFQTGDMVKAILPIGKFAGTHVGRLAVRESGVFDLRTAWGKISPVRHKYCKTVHRNDGYMYGFSTLVR

SEQ ID NO: 20658 - protein, 413 aa, unidentified
MTSYSFVLDANGKQLAPTKEQKAWFLIRKKRAALVSKYPMVIQLMKEIPENEICQDEIRCGIDDGGLHVGIALVQKCKTKNKVVFKGTMEQRNDVKHLMEVRRGYRRYHRYHKRYRQARFDNRKSSKREGRIAPSILQKRQATMRVINRLNKWINITNYWLEDVSVDIRALTDGYKPYRWQYQKSNRLDENIRKAAILRDGSKCMECGRANCRLEVHHIKPRRRNGSNTLDNLITLCESCHQKTEGQEELYMDRYFSLLKSSDHKNLNYAQHVMIGKKWLRKQLSNLGVLYLTNGGDTANKRIDWNVEKSHANDAICITALQPDTYDMKEWAIKPMRRQSKAKTDNVSGIRHRDLVEYTFKNGETHRGYVTALYPEQKAINFQSPTKHCKKVNARKCKLLWKYSKIYWFENAS

SEQ ID NO: 20659 - protein, 415 aa, unidentified
LMPCSPAKARLLLKEKKAIVVRRTPFTIQLTIATGESKQPVSLGVDAGYKHVGLSASTEKAELYASEGELRPDVSDLLSARRTLRQSRRNRKTRYRAPRFDNRIRTKRKGWLAPSVENRINAHLSRIGAILRLLPVTKITVETASFDTQLLKNPDISGKEYQEGEQLGFWNVREYVLFRDGHACQHCHGRSKDPVLNVHHLESRRTGGDSPGNLLTLCETCHKALHRREIKLKTKRGQSFRAEAFMGIMRWEVLNRLKASHPELEVHNTYGYRTKHTRIVNGIDKSHCADAFCIAGNLGAKRLGEFFFQKQTRRNNRQIHKLSILKHGLRKRNQAPFEVKGFRLFDKVVCQGEEGFIFGRRSSGSFDVRKLDGTRISAGISYKKLRLLEKRRTYLKEIRKEEALPPLPEGRSLRA

SEQ ID NO: 20660 - protein, 442 aa, Sutterella sp.; identical to SEQ ID NO: 3791

SEQ ID NO: 20661 - protein, 341 aa, unidentified
LFKNVKQKNKVFLKGTIEQRNDVKKLMSERKMYRKYRRKFKRYREERFSNRASAKRKGRIAPSILQKRQATMRVINQLNKWINISGYLLEDVAIDIRAMTDGYKSYGWQYQKSNRLDENIRKAVILRDGCKCMECGKSNCRLEVHHIKPRRNNGSNTMSNMITLCSKCHNKTEGKEGQFMDRYFSMINGYDNKHLNYASHVMIGKTWLREQLSNLAPLHLTTGGDTANKRIDWSIEKSHSNDAICITGLMPDTVNVKDWVLKPIRRKCKGKTDNVNGFKYKDYVQYTYQNGATYRGYVTVLCPKSNAISFQSNYKKCAKVNAHKCKLLWRFNSIYWLSERR

SEQ ID NO: 20662 - protein, 433 aa, Lactobacillus sp.; identical to SEQ ID NO: 6567

SEQ ID NO: 20663 - protein, 413 aa, unidentified; identical to SEQ ID NO: 14960

SEQ ID NO: 20664 - protein, 419 aa, unidentified
MFVYVLDKNGQPLMPTSRFGKVRRLLRDKKAKVVRSCPFTIRLLYEPETKIVQDVVLGVDTGSKYVGVACVGNNKVLYQSQVELRDDIKRKMDSRRKYRRNRRNRKTRYRTPRFLNRRNSIRKDRYCPTIVSKFHGHEREIEFCKKILPIKDMVLETGKFDTQLMEKPWLQEHKWAYQKGVNYGYTNAREHALVRDKYTCQYCGKKNCRVEAHHIIFKSKGGGDTLENLITLCEDCHKAVHLGKIELKLKGKRKSTLKYATQMSIIRSMLLKKYPDAIETFGYVTKANRENLNIGKEHYLDACVIASGGLEFEQSDVLYRKKCVSKQDRQLCKGIRGEKGLPTGKVFGFKKFDKVQYLEETCFIKGRRSSGSFVLMDINNNSIDFRNRGGKQNPSYKSIKRINARRSILCLAKRIETGE

SEQ ID NO: 20665 - protein, 493 aa, unidentified
MAAVYVISASGKPLMPTTRCGHIRGLLNAGKARVVEREPFTIQLKYETPDVTQPLYLGIDPGRTNVGSAVVREDGECVFTAQLTTRNKDVPKLMKARKQFRMAHRRLKRRCKRQRRAKAAETLSQKGEFQRLLPGYEEPILCKGIRNKEARFNNRQRPAGWLTPTANHLLLTHLNMVKKLQKLLPITDVVLEVNRFAFMAMENPSIRRWQYQQGPLYGKGSVEDAVYAQQDGHCLFCGKPIAHYNHVVPQHKNGSETLENRVGLCNEHHDLVHKDRAWDAKMKETKAGLNKKYHALSVLNQIIPALTEQLTAMFPQHAFVTTGKDTADFREDYGIAKEHHLDAYCIACSVLAEPTKVAAPTGKPHRLMQFRRHDRQGCHKENIKRVYLSEGKAVATNRHKAIEQKDDSLEEFRKTHTQQEVSALTVKDHQPVYKDMRRFMPGGVFLFNGKVHTLQRSHGRYKGMPFYYIDTDGSKNHAKGCIFLQQNCGLRWV

SEQ ID NO: 20666 - protein, 489 aa, unidentified; identical to SEQ ID NO: 5672

SEQ ID NO: 20667 - protein, 429 aa, unidentified
MKGAKHLVVYVTSQSGQALMPTKRFGKVRRLLKEKKAKVIRRCPFTIKLLYETETSIVQDVVLGVDTGSKNIGVSCVGNDKVLYQSQVVIRTDIKKNMDKRRSFRRNRRNRKTRYRPPRFLNRKNSTKLNRLPPSVRHKVQAHIDEIEFCKKMLPIAKIVLEVSQFDTALMKNPTLISEKVRRWGYQKGFNYGYSSRRAAVLHRDKYTCQICGAKHTRLEVHHIIFRSKGGTDDEKNLITLCEDCHAAIHAGKITLTKKPKKMNLKHATHMSIIRSQLLKKYPEAIETFGFVTKENRNNLRLPKNHYIDACVIASAGKSFIPSDEIYYKRRVAKGDYQLCKGSRGEVKLPVGKIQGFRKFDKVGYLGKTYFIKARMSSGYAALMDIFNEKADFSHMPKGYKTPKLKNLKRLAARTSVLCVRENIIADIA

SEQ ID NO: 20668 - protein, 471 aa, Acidiferrobacter sp.; identical to SEQ ID NO: 16644

SEQ ID NO: 20669 - protein, 419 aa, unidentified; identical to SEQ ID NO: 5032

SEQ ID NO: 20670 - protein, 413 aa, unidentified; identical to SEQ ID NO: 10655

SEQ ID NO: 20671 - protein, 456 aa, unidentified
MTNIYILDINGKPLMPCHNGAFVRCRLKNKEAKVVKRKPFTVQLMYEVKNNYKQDIYLGVDAGYKYIGFSASTSNQELFSGELEQDCGMVERNKERRMYRRQRRSRLRYRKARFNNRKAGKPQGWTAPSLQRKRDTHLRFIMMLSSIMPITDINVEIGLFDPALMKATAEGRTIKGADYQHGEAEGFENMKSYIRYRDSYTCQNPNCKCHKMKKEDREKLKLHVHHIGYYKHDRSSRPGNLITLCELSHTPETHQPGNLLYGWKPKMKSLRETAFMNTVRKEIVDTLKAVYPDKTVRYTYGYKTNLTRRDWHVPKSHHDDAFCIAGQYSLKRAETVYFNQQRRNNRSLEIFHDAKYIDSRDGKRKTGKELYCGRNTRNKSFNKENLHQYRSKKVSRGKRNIRKQHYKYQPNDIVVFEGQKYKIRGSHCKGSRVILDTKKSVSVKKIHILKHCSGIC

SEQ ID NO: 20672 - protein, 528 aa, unidentified
MATVYVLNKDGKPLMPTTRCGHIRHLLKEKKARVVRTNPFTIKLVYETDDVVQPLYLGIDPGRTNIGVAVVKVDGTAVFTAHLETRNKEIPKLMVKRKEHRQGRRHYRRCKRQRRAAAHGTLSKKCKKQDTAQGGNISKRAQTIGVFERNLPGCENSVLCIGIKNKEARFNNRVRPARWLTPTANQLLLTHVNFVKKICKFLPISDVVLEINKFAFMALDNPNIQKWQYQQGPLYQKGSLENAVSEQQDHHCLFCEKTIEHYHHVILRSENGSDTIANIVGLCAEHHDLIHKDDKLKEELAKKKQGLNKKYGALSVLNQIIPALTYELGSRFQGHFYVTTGKSTCDYRAAHSVSKDHWLDAYCIACSVLPDGCFDNTINSRVPYELKQFRRHDRQVCQQQNVKRKYYLDKKLVATNRHKAIKQETDSLEEYRNNGGTTDKLVVKEHKPTNKRLNRILPGALMAANGKLNVMVASRGLHNGIPDNYVFDNNSKAKPSKCTLINKNKGIVFVSNSVSQPEERSRKAAKRI

SEQ ID NO: 20673 - protein, 458 aa, Lactobacillus sp.; identical to SEQ ID NO: 4474

SEQ ID NO: 20674 - protein, 420 aa, unidentified
MQYVYVLSKHGEPLMPCSPGKARLLLKEKKARVVRRTPFTIKLLYRSAGYKQPITLGVDAGSKHVGLSASTEKRELYREEFTPRNDVVKLLSKRKQYRRSRRNRKTRYRAPRFNNRVHSKHKGWLAPSVEVKIQEHITVIKRICRIIPISLVRVETAEFDTQRLKAMLEGKSLPVGTDYQLGEMYDEYNVRQYVLKRDNYTCQCCGAHTTKKKTVKLHVHHLEGRQVGGNAPNNLITLCVDCHKALHAGKVKLDGKKRGKSFKDAAFMGIMRKTLMARLRDELSIPVQGTYGYITKMRREQNDIKKSHVNDARCISKHPLAEPCSVCYRTKAIRHHNRQTHKANFSKGGTRQRSQMPYVVEGYRLWDKVLYKGQECFVSGRRSSGSFTLKKLDGTCISKGVTFKKLRLLEPATNYLIERM

SEQ ID NO: 20675 - protein, 424 aa, Enterococcus sp.; identical to SEQ ID NO: 8320

SEQ ID NO: 20676 - protein, 420 aa, unidentified
MQYVYVLNKHGEPLMPCSPGKARILLKQQKACVVKRTPFTIKLLYGSAGYKQPITLGVDAGSKHVGLSASTEKRELYSEEFTPRNDVVELLSTRRQNRRSRRNRKTRYRAPRFNNRIHSKHKGWLAPSVEVKIQEHITVIKRICRILPITLVRVETAEFDTQRLKAMLAGKPLPVGTDYQLGEMYDEYNVRQYVLKRDHYTCQCCGAHNTAKKVVKLHVHHLESRKTGGNAPSNLVTLCTTCHKNLHKGKVTLDGKERDKPLRDAAFMGIMRKTLMARLKEELPIPVQGTYGYITKMRREQNDIKKSHTNDARCISKHPLAEPCSVCYRTKAIRHHNRQTHKANFSKKCIRKRSQMPYLVEGFRLWDKVLYKGQECFVSGRRSSGSFALKKLDGTSISKGVTFKKLRLLEPATNYLIERM

SEQ ID NO: 20677 - protein, 473 aa, unidentified
LLRQGRLIVKEVAYMSTVYVLNKDGKPLMPTTRCGHVRHLLKEQKARVVASKPFTIQLLYKTNDVVQPLYLGIDPGRTNIGVAVVKADGTAVFTAHLETRNKEIPKLMKKRKDSRRARRTNGRRCRRQRRAKANGTISKKCVKHDTAQNGSVSKHAKEIGVIKRHLPGCEKDVLCIGIKNKEAKFSNRTRPEGWLTPTANQLLQTHINLVKKIQKFLPISDVVLEINKFAFMRLDNPNVQKWQYQQGPLYQKANLEETVSEMQEHHCLFCKKKIDHYHHVVPQHKNGSNTIDNIIGLCTQHHDLVHKDATWQKRLAKKKTGLNKKYGALSVLNQIIPALTKELSSLFPKHFFVTNGKSTYDYRAAHGVSKDHWLDAYCIACSVLPNDVCDSGINNRVPYELKQFRRHDRRALNNENMSRVYTLNDNVVATNRHKATKQTTDSLEEFRQNHPDDVCKLKVKEHHPTYRNMNRNY

SEQ ID NO: 20678 - protein, 424 aa, Phormidium sp.; identical to SEQ ID NO: 13754

SEQ ID NO: 20679 - protein, 406 aa, unidentified
MVYVQDIDGKPLMPTTRHGKVRRLLKSNKAVVVNLCPFTIRLTYISDSYKQEIVLGVDAGTKHVGLSATTKSKELYSSEVILRNDIVDLLSTRRELRRTRRNRLRYRKPRFDNRVKSKRPGWIAPSVKYKVDAHIRVVENVCSILPISRIVIEVAQFDTQKIKNPEISGKEYQEGDQLEFWNTREYVLARDGHKCQYCKGKSKDSILNVHHIESRKTGGDSPSNLITLCETCHKEYHKGNIDLKIRRGKSLRDAAVMGIMKWRLYEELKSRYDRVFMTFGYITKHNRIKYGIEKSHTSDAFVISKNINAKRIERQYLKRLIRRHNRQIHKMKILKGGKKKNNQAPFEVFGFRLFDKVLYNNKIFFVYGRRKSGSFNIRDFNGENSKDVSRKKFKLVRGKRHPIILK

SEQ ID NO: 20680 - protein, 388 aa, unidentified
LLKDNKAVVVNTCPFTIKLTYKTSDYKQEIVLGVDSGTKHVGLSATTKSKELYASEVILRSDVVDLLSTRRGLRRTRRSRLRYRKQRFNNRVKSKKDGWIAPSVRHKIDSHIRIISFVYSILPVSKLIVEVAQFDTQKIKNPEISGKEYQEGEQLGFWNVREYVLARDGHKCQHCKGKSKDPILNIHHIESRKIGGDSPSNLITLCETCHKEFHKGNIKLKVSRGKSLRDAAVMGIMKWKLYEELKSRYDNVSMTFGYITKYNRINHGIEKSHVSDAFVISRNFNSCRLGYYYKRKLVRRHNRQIHKMKILKGGIRKRNQAPFKVFGFRLFDKVMFQGEEHFIYARRLSGQFNIRDINGENKKDVSCKKLKYVSHGLVSVKTNLFLSQ

SEQ ID NO: 20681 - protein, 204 aa, unidentified
MPNKVYVINKHGRPLMPCSPAKARHLLDAGKAKVKKRTPFTIQLVYGSSGYTQEVILGVDDGSKTIGISASTKKEEVFAADVTPRNDVVNLLSARREFRRARRNRKTRYRKSRFDNRVRSKRKGWLAPSVEVKIQEHITSIKMVCRILPVSKVVIETAEFDLQLLKAIADGKPVPQGEDYQKGEMYGHYNVRQYVLWRDDYTCQ

SEQ ID NO: 20682 - protein, 415 aa, unidentified; identical to SEQ ID NO: 4683

SEQ ID NO: 20683 - protein, 254 aa, unidentified; identical to SEQ ID NO: 9597

SEQ ID NO: 20684 - protein, 406 aa, unidentified; identical to SEQ ID NO: 9317

SEQ ID NO: 20685 - protein, 465 aa, unidentified
MSTCVCVLSNSGKRLMPTFRLGKVRHLLKDGKAKIVKHHPFTIQLLYDSKTNTQPIEICEDVGYNYIGISVKSQSHEYVSAQYDTLQDEKACHDSCRKLRRSRRNRLRYRKPRFDNRKRGEGWLAPSLKHKKELNVNVVKMYCAVMPITHATVEVGSFDTMLVKAIQEGKAIPEGADYQKGPRYNLATLREAVFYRDNYVCKVCGRKATEGAILHVHHMFYWKGRHGNSLSELITVCEKCHTPANHQKGGKLYGFGENVKFADLSGAAFMNTVRWQIVNELYAAFGKDFVTVTYGAMTKEKRIALRLEKSHNNDAYAMGEFHPNCRCTFEHYEKVRRNNRTLEKFYDSRYIDIRTGEIATGKELFNGRINRSHKKDSENLHKYRGKRIRKGYRALRRKKVALNPGDLVSLNGEILTVHGTHTKKNGSVNVEFKTPSKSGKKSTSLKKLKIIKTISPMRSAWDKVS

SEQ ID NO: 20686 - protein, 546 aa, unidentified; identical to SEQ ID NO: 12293

SEQ ID NO: 20687 - protein, 421 aa, unidentified
MVYVLDITGQPLMPTDRHGKVKHLLKDGKVKVVKRCPFTIQLLYTTTTYTQEITLGVDAGSKVIGLSASTPRRELYSSEVTLRNDIVKLLSLRREYRRSRRNRTTRYRAARFNNRVHSKNKGWLAPSIENKINTHIKVVADIHKILPISKIVVETASFDIQKIKNPNISGEEYQQGEQLDFWNVRQYVLFRDNYTCQCCKGKSKDNRLAVHHIESRQTGGNAPNNLITLCITCHKKYHKGKIKLPNTIKRDKIFKDAVFMGIMRWAFYERLKNIYPNIRMTYGYITKNTRIQHNLPKTHYTDALCISGNPLAKPLEVLYIQKAIRTRNRQIHKATISKGGIRKLNQAPKYVFGFQLYDKVLYKGKECFIFGRRSSGSFDIRTLDGTKISPGVSHKKLKLLEKRKTILTERVIKNQEGGKQG

SEQ ID NO: 20688 - protein, 420 aa, unidentified; identical to SEQ ID NO: 6507

SEQ ID NO: 20689 - protein, 418 aa, unidentified; identical to SEQ ID NO: 17178

SEQ ID NO: 20690 - protein, 426 aa, Hydrocoleum sp.
MSNSTNYVFVLDASKKPLTPCQPGIARSLLKAGKAKVFRRYPFTIILNKLVAEKHQGLLLKIDPGSKQTGLALVSQDGEVIFAMVLVHRGQQIKNALERRRNIRQGRRHRKTRYRQPRFLNRNHKKGWLPPSLMHRVLTVETWVNRLIKLAPIDSIAMELVRFDTQKMINPEVSGVEYQLGVLAGYEVREYLLDKFNRTCAYCDAKNVPLEVEHIQPKSKGGSNRISNLTLACRPCNEAKGNQDIQDFLLGKPNLARRILSQAKAPLKDAAAINATRWKLFETLKAKGLPITTGSGARTKYNRCRLDLPKEHWIDAACVGEVEQLTILTTQPLVVTAMGHGCRKMVQMDKYGFPRKGYQAKKPVGGWKTGDIINFVKGKNIGLKGVRIKTVRSKGNFDIRHGDKILSVSRNHIQPIHRRDGYNYSF

SEQ ID NO: 20691 - protein, 477 aa, unidentified; identical to SEQ ID NO: 2625

SEQ ID NO: 20692 - protein, 477 aa, Blautia sp.; identical to SEQ ID NO: 2707

SEQ ID NO: 20693 - protein, 512 aa, unidentified
MSTIYVLNKDGKPLMPTTRGGHVRHLLKEQKARVVRAKPFTIQLLYETNDVVQPLYLGIDPGRTNIGVAVVKANGTAVFTAHLETRNKEIPKLMQDRKKARRARRTNGRRCRRQRRAKANGTISKKCVKQTTAQNGSVSKRAKDIGVIKRRLPGCEKDVLCIGIKNKETKFTNRTRPEGWLTPTANQLLQTHINLVKKIQKFLPISDVVLEVNKFAFMRLDNPNIQKWQYQQGPLYKKESLESAVSEIQEHHCLFCKKPIDHYHHVVPQHKNGSNTIGNIVGLCAKHHDLVHKDSAWEKKLAKKSTGLYKKYGALGVLNQIIPALTNKLSVLFPKHFFVTTGKSTHDYRESHSVSKDHWLDAYCIACSVLPSNVCDSNINNHVPYELKQFRRHDRRALHKENMSRVYTLNGKAVATNRHKAIKQTTDSLEEFRQSHPGDVCKLKVKEHHPAYRNLNRNHPGSVFFVGEQAHVMQSIVASKDGKATRYKDTNVNKIAAGQCRFVAKNEGIVFT

SEQ ID NO: 20694 - protein, 428 aa, unidentified
MLVYVLKQNGQPFMPTERFGKVRRLLKEGKAKVVRREPFTIKLLYEPETDVVQECYCGVDTGSKHIGVAVVGNDKVLYQSQIELRNNIKKKMNARRASRRNRRNRKTRYRKQRFLNRRNSIKKDRLPPSVKHEVQSHIDEIEFCKKILPVSDLILEVSQFDTALMKNPSLMNEKVKHWGYQQGFNYGYSSRRSAILHRDNYTCQCCGKKNCRLEVHHIKFRRNGGTDDEENLITLCEECHKSVHAGTVVLNKKLKKSKNLKYATHMSIIRSRLLREYPDAIETFGFVTSENRNHLNLKKTHYIDACVIASGGLEFKQSNVIYYKCRVSKGDYRLTRGIRGEQKLPTGKICGFRKFDKVKYFGEEYFIKGRTSSGTAVLMDIFGSKINFNSMPKGLKTPKMFNFKRISVRRSCLCIRKIMEDRAISVLN

SEQ ID NO: 20695 - protein, 450 aa, unidentified; identical to SEQ ID NO: 2935

SEQ ID NO: 20696 - protein, 452 aa, Lactobacillus sp.; identical to SEQ ID NO: 19050

SEQ ID NO: 20697 - protein, 427 aa, unidentified; identical to SEQ ID NO: 2799

SEQ ID NO: 20698 - protein, 428 aa, Oblitimonas sp.; identical to SEQ ID NO: 4442
  source 1..428: note = isolate UBA2439

SEQ ID NO: 20699 - protein, 431 aa, unidentified
MPNKVYVINKHGRPLMPCSPAKARHLLDEGKAKIKKRTPFTIQLVYGSSGYTQEVILGVDAGSKTIGMSASTTKEELLSAEVKPRNDVVDLLSTRREFRRARRNRKTRYRKPRFDNRVRSKHKGWLAPSVEVKIQEHITSIKRVCRILPVSKVVIETAEFDLQLLKAIEEGKPVPQGEDYQQGEMYGHYNVRQYVLWRDGYTCQCCGAHATKKKEVRLHVHHLESRKVGGDAPDNQVTLCESCHEKLHKGLIAEKDFKKRKRRSTRDATFMGIMRKTLMQRLCSELPIPVVKTRGYITKATREKLLVLPKSHTNDALAIAQGKRGFNVGYLPEIAQIDKIYTIRPVRHHNRQLHKAAILKGGIRKSNQAGKYVFGYRLFDKVQFNGQDCFIWGRRTTGIFTIKTINGKMIKDGISFKKLKPVEKSTSYLIA

SEQ ID NO: 20700 - protein, 424 aa, unidentified; identical to SEQ ID NO: 3434

SEQ ID NO: 20701 - protein, 433 aa, Moorena sp.; identical to SEQ ID NO: 12596

SEQ ID NO: 20702 - protein, 411 aa, unidentified; identical to SEQ ID NO: 2663

SEQ ID NO: 20703 - protein, 200 aa, unidentified
MVYVVANDGQPLMPTERHGKVCRMLRSGMAKVIKKCPFTIQLQYESERNVQPVSLGVDAGSKHIGISATTKAKVLYESDVELRDDIVKLLATRRQLRRSRRSRKTRYRPARFDNRKRKEGWLAPSIRQKIGSHLTVVANVCKILPINQIIVETASFDIQKIKNPEIQGIEYQQGEQMDFWNVREYVFFRDGHTCQCCKGR

SEQ ID NO: 20704 - protein, 456 aa, Halomonas sp.; identical to SEQ ID NO: 3067

SEQ ID NO: 20705 - protein, 512 aa, unidentified; identical to SEQ ID NO: 3711

SEQ ID NO: 20706 - protein, 447 aa, unidentified; identical to SEQ ID NO: 7023

SEQ ID NO: 20707 - protein, 423 aa, unidentified; identical to SEQ ID NO: 8486

SEQ ID NO: 20708 - protein, 431 aa, unidentified
MPNKVYVINKHGRPLMPCSPAKARHLLDEGKAKVKKRTPFTIQLVYGSSGYTQEVILGVDAGSKTIGMSASTTKEELLSAEVKPRNDVVDLLSTRREFRRARRNRKTRYRKPRFDNRVRSKHKGWLAPSVEVKIQEHITSIKRVCRILPVSKVVIETAEFDLQLLKAIADGKPVPQGEDYQKGEMYGHYNVRQYVLWRDDYTCQCCGAHATKKKEVRLHVHHLESRKVGGDAPDNQVTLCESCHEKLHKGLITEDDFKKRKRRSTRDATFMGIMRKTLMQRLCSELPIPVIETRGYITKATREKLLVLPKSHTNDALAIAQGKHGFNVGYLPGIEQIDKIYTIRPVRHHNRQLHKATILKRGIRKSNQAEKYVFGYRLFDKVQFNGQDCFIWKRRTSGYFVVKTIDGKIIHNSASFKKLRIAERASNYLIA

SEQ ID NO: 20709 - protein, 411 aa, Vibrio sp.; identical to SEQ ID NO: 15895

SEQ ID NO: 20710 - protein, 474 aa, unidentified
VVIVLDKYKKPLGVCSEHRARQLMEQRRACVYRYFPFAIILKDKDVREMDDLPSFRIKIDPGSKYTGLAVVRDSDNAVVLFMQIEHRGELVVKNMKTRSGARRNRRQRETRYRRCKYINHYLPKDSKYKVDSDRPEGWLPPSVKSIGDNIISWVRRLGRLLNITSCSFEAVRFDTQLLDNPDIEGIEYQQGTLFGYELREYLLDRYGHQCQYCGGESGDTILEWEHIKPKSKGGSDSVKNATLACHTCNQDKGNLSLDEWATVERGIKGPAARKKLAEARLKGIEQIKAHKAPKVSDRYCAWANSSRRYIEKALFGIFGDVECASGGRTKFNRVRLGLPKDHHYDALCVGTVPDGGYRDLTGDRCLYAKAMGRGTRFRGKINSCGIIVKKLQKVPKRINGFRNGDIVAADVPKGKYKGHHVGRVMTRRSGNFDIRTMDGDFAAANYKYCRLLQYNNGYQYRYVRFTATIPLGNK

SEQ ID NO: 20711 - protein, 476 aa, Blautia sp.; identical to SEQ ID NO: 19906

SEQ ID NO: 20712 - protein, 557 aa, Blautia sp.; identical to SEQ ID NO: 7395

SEQ ID NO: 20713 - protein, 464 aa, unidentified; identical to SEQ ID NO: 6574

SEQ ID NO: 20714 - protein, 415 aa, unidentified; identical to SEQ ID NO: 16389

SEQ ID NO: 20715 - protein, 420 aa, unidentified
MQYVYVLNKHGEPLMPCSPRKARLLLKQKKACVIKRTPFTVKLLHGSAGYKQPVTLGVDAGSKHIGISATTEKHELYREEATPRNDVVDLLSARRAFRRSRRNRKTRYRAPHFNNRVHSKHKGWLAPSVEVKIQEHITLIKHVFRILPVTLVRVETAEFDTQRLKAMLEGKPLPVGTDYQLGEMYDEYNVRQYVLKRDNYTCQCCGAHSTKTKGVKLHVHHIETRRTGGNAPNNLITLCKACHKALHAEKVTLDGKKRGKPLKDAAFMGIMRKTLMERLRKELKIPVQGTYGYITKYLREKNGIPKSHTNDARCISKNPLAIPCDTCYYTKAVRHHNRQLHKATILKGGIRKANQAPYIVKGYRLWDKVAYNGTECFITGRRTSGYFALKELDGTAVSNSISYKKLRLLEAATNYITERK

SEQ ID NO: 20716 - protein, 430 aa, unidentified
MLVYVLKQNGQPFMPTARFGKIRRLLKAKKAKVVRREPFTIKLLYEPETDVVQECYCGVDTGSRHIGVAVISNDKVLYQSQTELRSDIKRKMDARRAYRRNRRQRKTRYRKPRFLNRGNSIRSDRLPPLIKHKVHAHIDEIEFCKKILPISDSNLIIEVSQFDTALMKDPSLISEKVKHWGYQQGFNYGYSSRREAILHRDNYTCQCCGKKNCRLEVHHVKFRSNGGTDDEENLLTLCEDCHKGVHAGTVTLNKKPKKSKSLKHATHMSIIRSYLLKKYPNAIETFGFVTSENRNHLKLEKDHYIDACVIASGGLEFKELDVIYYKRRVSKGNYQLTKGFRGEQKIPKGKICGFRRFDKVKYFDNEYFIESRKSSGFATLIDIFGNQIDFSYMPRGMKTPKLSNCKRISARSSCLCISQIRKERAIHVLS

SEQ ID NO: 20717 - protein, 451 aa, unidentified; identical to SEQ ID NO: 10609

SEQ ID NO: 20718 - protein, 418 aa, unidentified
MVYVLGQDGHPLMPTCRHGKVRRMLKSGMAKVVKRCPFTIQLQYESTIHTQEINLGIDAGSKTIGVSATTEKKVLYESEVILRNDIVGLLSGRRALRSSRRNRKTRYRKPRFDNRKKPDGWLAPSIRQKIETHVTVVGNVIKILPVTKIIVETASFDIQKIKNPEIEGEGYQHGEQLNFWNVREYVLFRDGHTCQCCKGKSKDSILNVHHIESRKTGGNAPNNLITLCETCHKAYHKGIITLPKEIYRGMRFRDAAFMGVMRWAFYDRLKELYNPLGVEVINTYGYITKNTRIEYGLPKEHYVDARCISGNPAAKDLGHYYFQKKVRCHNRQIHKNTILKGGTRKRNQAAYLVKGFRLFDKVKYQDQEYFIFGRRTRGSFDIRTLDGTKVNKGSISCKKLQLVEKSKHYLTEQRKVTA

SEQ ID NO: 20719 - protein, 421 aa, Ktedonobacter sp.
MNVVYVLSPDRVPLMPCSCAIARLLLKQGKAKVVRRTPFTIKMYTQPVDTHTQPLTLGIDTGSAVIGSAVSDECGNILYVSEGEVRNDIAQTMKNRATSRRNRRYRKTRYRPARWLNRRNSLKTGRFSPTMTSKTEAHLREIRFVQSLLPIQSIVLETGTFNPHALKHPAVLQNKWMYQKGINYGLANTKAYVLTRDGYVCQRCKGQSKDRRLEVHHIVFRSQQGSDEEANLLTLCKTCHEGLHAGTVTLKQKGKRKGNLLHATQMNSIRIQLLSRVEAIETWGFVTKEHRLLAGLPKEHIFDAAMIATRGNIPVFQTTEVLLKKCISDGDYQQTKGKHSQQRIPTGKIAGLRKFDKVRYLGVEYFIKGRMSTGYAILMDLSGNKLALKPTPKFDNMKRVSARSSWIINQKAMPSFSSSPT

SEQ ID NO: 20720 - protein, 311 aa, unidentified
LRVFVLNKRGKPLMPCSPAKARLLLKEKKAIVKRRTPFTIQLTIATGETKQPVGLGVDAGYKHVGLSASTDKAELYASQVELRQDITDLLSARRALRRARRNRKTRYRAPRFNNRIRTKRKGWLAPSVENRINAHLSRIEAVLRLLPITKITVETASFDMQRLKNPDISGKEYQEGEQLGFWNVREYVLFRDGHVCRHCHGRSKDPVLNVHHLESRRTGSDSPDNLITLCETCHKALHRGEITLKAKRGQSFRAQAFMGIMRREVLNRLKASYPELKVHETYGYLTKHARIANGIVKSHGADAFCIAGNLG

SEQ ID NO: 20721 - protein, 443 aa, unidentified
LTKDENRPSGRTTGLRAEQAEPAGIRKGDTLKVFVLNMRGKPLMPCSPAKARHMLKAGKAFVVRRTPFTIKLTIATGETKQDVTLGVDAGARHVGISATTEKEEVFASEVALRQDITGLLADRLAFRRARRNRKTRYRAPRFNNRVRSKHKGWLASSVENRIQAHMSRIDAVCRLLPVTKIVIEAASFDVQKIKNPTIEGTDYQQGDQLGFWNVREYVLFRDGHICQHCRGRSKDPILNVHHLESRKTGGDAPNNLITLCETCHKAYHAGKIKLKVKRGQSFRAEAFMGIMRWTLLDRVRKTHPKLPVENTYGYLTKHKRIALGLPKTHCADAFCIAGNLKALRRGDFLFQQQTRKHNRQIHKCSILKGGVRKLNQAPFLVKGFRLFDKVRIGGQIGFVFGRRVRGTFNIRRLDKTVIGTDINCKKLSLLETRKTFLTELRKE

SEQ ID NO: 20722 - protein, 516 aa, unidentified
MTLNERRHRMPEYIYVLGMDGKPQMPTTRRRHVQKLLDTGKARIAERVPFTIQLLYDNDPVLQPVTLAEDPGRTNIGLAVLDLKGELLLSAVVETRNKEIAKLMEKRRQCRRASRNGERKARQRLSKKYGTMIKAGMVMRKLPLYKADKFITCKFIRNTEARFCNRKRKDGWLTPSARHLVQTHINLIHKIRKYLPVTDIAFEVNRFAFMQLENPSVSGVDFQNGPLKGYDDRDAAVYDLQDGKCLMCRHGITQYHHIVPRSRNGSNTIGNIAGLCDTCHDKVHKDADFAKQLKDKKEGLDKKYGALSVLNQAIPFICQKLEAEFGKEHVHYCTGRETSLVRRSIGYHKTKKDQFHEVDAWCIGALALNWIPERAPDFTEVHLVRQFRRQDRSLIKAQTERVYKLDGKTVAKNRKKRTGQKTDSLEDWYNKQVESYGKPKADQLRSRLTVEKSQRRYNDPFRIRPGTVFLYKGKRYVLSGQLTGGRYFRAVGDMKTNYPAAKCRILKQNEGLVFIS

SEQ ID NO: 20723 - protein, 431 aa, unidentified; identical to SEQ ID NO: 7173

SEQ ID NO: 20724 - protein, 424 aa, Mastigocoleus sp.; identical to SEQ ID NO: 6040

SEQ ID NO: 20725 - protein, 415 aa, unidentified; identical to SEQ ID NO: 3548

SEQ ID NO: 20726 - protein, 406 aa, unidentified; identical to SEQ ID NO: 6445

SEQ ID NO: 20727 - protein, 466 aa, unidentified; identical to SEQ ID NO: 2459

SEQ ID NO: 20728 - protein, 419 aa, unidentified; identical to SEQ ID NO: 3628

SEQ ID NO: 20729 - protein, 415 aa, unidentified; identical to SEQ ID NO: 6534

SEQ ID NO: 20730 - protein, 518 aa, unidentified; identical to SEQ ID NO: 7468

SEQ ID NO: 20731 - protein, 429 aa, unidentified
QNKQRKARKDHTEIQNGNADICRTTISCKSVQISYPAAEKSVTHKIIRGKEGKFANRHRDEGWITPSARQLVQMHMNDLKSMCKILPISHVTLERVAFDFQKLENENIKVWEYGKGKLYGYDSPEEYIHDVQNGKCLVCGKPHIDYLHHIIPRSKGGSDKVSNIAGLCYDCHYGPMGVHNCQNTQDRLPELKSEANKQYKVSLLNSVMPVLIEEMDKFCKANSIMFSICEGHDTAKVRDMYDLQKDHCIDGFAISLVDRNVKSVDVMPDRIYQKQRYKKKSKNIIQKRNCREYYDDKKLVAVNRHKGTDQKADSLEEYMNTYAETHTADECKNQFESLTVKPARRTYTFHKEGRICPFHIGDKVRYEKKNKIKGNTKVDTFICEGIRFVKDENKAEVKHNKTKSKKMKFCRVLESGCTPYVDYRKLALM

SEQ ID NO: 20732 - protein, 535 aa, unidentified; identical to SEQ ID NO: 6116

SEQ ID NO: 20733 - protein, 442 aa, Sutterella sp.; identical to SEQ ID NO: 7529

SEQ ID NO: 20734 - protein, 512 aa, unidentified; identical to SEQ ID NO: 4216

SEQ ID NO: 20735 - protein, 408 aa, unidentified; identical to SEQ ID NO: 17248

SEQ ID NO: 20736 - protein, 419 aa, Moorena sp.; identical to SEQ ID NO: 2658

SEQ ID NO: 20737 - protein, 416 aa, Lactobacillus sp.; identical to SEQ ID NO: 7050

SEQ ID NO: 20738 - protein, 465 aa, unidentified; identical to SEQ ID NO: 5478

SEQ ID NO: 20739 - protein, 367 aa, unidentified
MSTSVFVLDKKHRPLMPCRPARARRLLRAGRARVVKRFPFVIRLVDRTVEQSEVQPVLIKLDPGSRETGAAVVRDDEKKRHHALAFFVIKHRGGAIRDALKARSAFRRRRRSQNFRCRSPRFLNRVKPKGWLPPSLRHRVETTLSFVRRMCRYLPVSGIATELVKFDSQKLQNPEVSGVKYQQGTLFEYEVREYLLEKFGRKCVYCGAEGVPLNIDHVVPRAKGGSNRVSNLVLACVSCNQKKGARSLEDFLKGKPEVLARVRRELKTPLRDAAAVNATRWVLFNELKATGLPVETGSGALTKLNRHAFGVEKEHWLDALCVGRLNGVVTRKGLNVLEIRCMGRGSRQRTRLTKYGFPRGYLMRQKC

SEQ ID NO: 20740 - protein, 406 aa, unidentified
LKEKKAIVKRRTPFTIQLTIATGEAKQPVALGVDSGYKHIGLSATTEKAELYASEVELRQDITDLLSARLALRCSRRSRKTRYRAPRFDNRVASKREGWLAPSVENRIAAHMSRVEAVMRVLPVTAITVETAAFDTQLLKNPDIAEAAYQQGEQLGFWNVREYVLFRDGHVCQHCRGKSKDPILNVHHIESRRTGGDAPNNLITLCETCHKAFHRGEIELKVRRGKSFKAETFMGIMRWTLFERLKKAHPELSVRNTYGYLTKHKRISHGIAKSHCADAYCIADNLGAKRLEGFFFQKQTRKHNRQIHKLSILKGGLRKKNQAPYEVKGFRLFDKVICKGEEAFIFGRRTSGSFDVRRLDGTRISAGISCKKLRLLEPRTTYLTEFRKEAALPPLHECSGSRAEFR

SEQ ID NO: 20741 - protein, 477 aa, Blautia sp.; identical to SEQ ID NO: 2707

SEQ ID NO: 20742 - protein, 470 aa, unidentified
MSVFVVGLNGCRLMPTSERKARLLLKQGKAFVEQKVPFTIRLNYKTGSTTQLGYLGIDTGSQHIGVSVVREDGTVLHKEEIGLRDSMSKRKLLEAKASLRRGRRYRKTRYRHPKWRPKTKRVYCEVPDRKGRHWQKKKITFTSKRPKGWLPPSLQSKTDHHIRWIKKLQDLLPEGYRLSIELGRFDPARMKNPEIHGDLYQKGPQHDYENVRAYVLDRDRYTCQICKKKGGKLHVHHILYRSHGATDDPQYMVTVCSDCHSAQNHLPGGILYQWMQEQKRFSRGLRDATFMNILRKRLIRAFPEAVFTYGNVTKVDREKLKLPKSHGNDATAIALVKTGITAVKDKESVICIQQVRRKKRSLHEETPRKGRKEPNRTAARNNKNTKAVTVTKRQNKKKVSMTGCLFDRVELNGKKGWISGFTGKSCYVKDADDQYLSTSPKYKQVSLSKLRILHHCGNWIIGAKKTLGKG

SEQ ID NO: 20743 - protein, 416 aa, unidentified
MVYVLDKNGQPLMPTDRHRKVRLMLQSGQAKVIKRCPFTIQLNYDSGHQTQEISLGIDAGSKHIGVSATTKIKVLYEADVELRNDIVNLLSSRRELRRGRRNRKTRYRQAKFNNRRRGNGWLAPSIRQKIGTHLTVVKNICKILPISRIMVETASFDIQKIKNPDIQGAEYQQGDQLEFWNVREYVLFRDGHTCQCCKGKSKDKILNVHHIESRKTGGNAPNNLITLCETCHTGYHKGTVQLPKAIKRGMRFKDAAFMGIMRWAFYEALKQQYEPVGTPVHNTYGYITKHTRIAYNLPKEHYVDARCISGNPEASSNGEYYYQKKVRCHNRQIHKLTVLKGGIRKQNQATYLVKGYRLFDKVSYQGKGYFVFGRRQSGFFDIRTLSGEKVNKGSLSCKKLKFIATRTYYLTERRAV

SEQ ID NO: 20744 - protein, 415 aa, unidentified
MIYVRSKEGKALMPSERGGRIGYLLRHGKAHVVSRVPFVVQLDYESTTYTQEVSLGIDAGSKHIGVSASSEKRELLAAQVELRSDVVNLLSTRRELRRARRNRKTRYRKVRFDNRKKKDGWLAPSIEQKVESHLKVIRLVHKLLPITKTTIEVAQFDAQKIKNPDIKGDEYQQGEQMGFGNVREYVLARDGHKCVHCKGKSKDPILNVHHLESRKVGGNSPSNLVVLCETCHKAYHRGEFELKIKRGTTLRDAAVMNIMRWSVYERAKAEFGNVYLTYGYITKHTRIENDIEKTHAADAFCIAKNVHARRSRTFFMCRCVPRHTRALHVANPKKSGIRRSCIASHKIGKSRFQRFDMVRWKGKECFIFGSTHGNVVLRKIDGVKVHETQAVSAKTIKFLKRIRNNILMEERASES

SEQ ID NO: 20745 - protein, 425 aa, unidentified
MRIFVLDAKKRPLDPCHPARARQLLKAGRAAVYRRKPFTIILKDRLLENSIVHSHRVKVDPGAKTTGLAVVQEETARVVWAAELEHRGDVIHKRMLERASLRHSRRSRKTRYRKPRFNNRRRPEGWLPPSLESRVANIITWVKRLTRWCPVSVISLELVKFDTQKLQNPEINGVEYQQGELFGYEVREYLLEKWSRKCAYCGKTNVPLEVEHIIPKSRGGTDRVSNLTLACHKCNQKKGNKTAEEFGFPEIQKRAKQPLKDVAAINTTRWVLYNRLKVIGLSLETGSGGKTKYNRTRLGLPKTHWLDAVCVGDSTPDTLFVEKDAVLHIKAIGHGKRQRCKTDKHGFPIAHAPQQKKYMGFQTGDIVKAVIPKGKYAGIHIGRVAIRFRPSFKLNGFDVHPKYLRLLQRADGYEYEYLAAHSPSQ

SEQ ID NO: 20746 - protein, 406 aa, unidentified; identical to SEQ ID NO: 15432

SEQ ID NO: 20747 - protein, 487 aa, unidentified; identical to SEQ ID NO: 17346

SEQ ID NO: 20748 - protein, 413 aa, unidentified
MKVYVINKRDRPLMPTTARKARLLLKFGKATIHRREPFTIKLIYGSTGYTQPGNLGIDAGYKSVGFSAVNSTEELIGGEVKLLERISERLAERRQYRRQRRNRLRHRQPRFNNRCRLRGWLAPSIQHKLDSHHKIIKLVKEILPIKKVTVEVASFDLQKIKNPDIEGKGDQQGEQLGFSNLREYILHRDNHKCQNPNCKNKAKQPILQVHHLGFWNQDRSDRPSNLITLCSKCHTPANHKPGKFLHGWKPKLKSFKPETFMTLVWRKLTTDVGYEATYGYITKDVRREYQIEKSHHNDAFVIAGGTNQRRIEPIKYQQVRRNKRSIEQFYDAKYIDLRDGNINSGTELFSGRRTRNKNENTENLRKYRGQKVKQGQRRIKVHRYPYSQHDLVLYEGKVFSVIGMQNKGKGADC

SEQ ID NO: 20749 - protein, 419 aa, unidentified; identical to SEQ ID NO: 4131

SEQ ID NO: 20750 - protein, 411 aa, unidentified; identical to SEQ ID NO: 19170

SEQ ID NO: 20751 - protein, 545 aa, unidentified
VQFAWWLCHPKPSDNIEDVNHETALMLLQIKAGTETFGTAPCGSGPKAEGVSPERKSMNTVAVVTNTNKPLMPTSPYRARKLLSSGKAKIVKHRPFTILLVNRSDGNVQEIEYKSDTGYLHVGISVCSEKREFVREQRDLLPDEKEKHNDRRKYRRTRRNRKRYRKARFDNRIGKIRKKEKNEHVWLPPSLDHKVDAQVQLFLRLYQVMPIKRAVFEIGQFDPALMKALEKGEAAPQGIDYQMGERYQIATRRAAVFTRDRYACVFCGRSIKDHAILHVHHIGFWKQDRSNRLDNLATCCEQCHTSENHRPGGILYGVEPKLKSLASATYMNVVRFELLRRLKEAAPDVEFHISYGAKTSVIRKQRSISKSHTNDAYCLGQYFPKLRAEEIGFQKIRRNDRILQKFYDAEYLDSRDGTTKKGKKLTNGRISRNHMKDHKNLHQYRGKKLSKGRITIRRGRSSLKSGSLVRFNGEVLTVHGTHRSRKKNKAGHIKVSVNVEFECPSKTGRKSAALSKCQIISRSYNTGWKQIQLRKEEQGKITAVV

SEQ ID NO: 20752 - protein, 431 aa, unidentified; identical to SEQ ID NO: 6230

SEQ ID NO: 20753 - protein, 418 aa, unidentified
MVYVLSKTGQPLMPTENHAKVRVLLKQQKAKIVHRCPFTIQLLYDSTDYTQQVSLGIDAGSRHIGVSATTETKVLYEADVTLRNDIVDLLSTRREARRTRRSRKTRYRKPRFNNRTRKDDWLAPSVKQKMDTHLTTLRKVTEILPVNSITVETASFNIQKIKNPNIASTGYQQGEQLDFWNVREYVLFRDGHKCQCCKGKSKDPVLNVHHIESRKTGGNAPNNLITLCETCHKGYHNGTVSLPKNIRRGMKFNDAAFIGAMRWAFFNRVKETYEPLGIMVNMTYGYITKNTRIEHNLPKDHFIDARCISGHPDATSDGTVFYQKKVRCHNRQIHKQKILKGGIRKRNQAPYLVKGFRLFEKVKYHGKQYFIFGRRSSGFFDLRTLDGTKVNKGSVSYKKIRSLDMPRSYLTEERKAIV

SEQ ID NO: 20754 - protein, 413 aa, unidentified; identical to SEQ ID NO: 3476

SEQ ID NO: 20755 - protein, 424 aa, unidentified; identical to SEQ ID NO: 3351

SEQ ID NO: 20756 - protein, 431 aa, Ktedonobacter sp.
MSKVFVLDIYEKPLEPVHPGRARILLSQRKAAVFRTFPFTIILKIKGEPLQIEPLRIKLDPGSRTTGIAIVNDRSGEVVFAAELSHRGHKIKESLDSRRAFRRSRRRRKTRYRKARFLNRRHHASWLPPSLESRVANVQTWVNRLARYAPISAMSMELVRFDMQLMENAEISGVEYQQGALAGYEVREYLLEKWNRKCAYCLKQGISLQIEHIVPRAKGGTNRVSNLTLSCEKCNTAKGTLDSAVFLKKKPAVLQRILAQVKKPLKDASAVNTTRWALYERLKATGLPIECGSSGLTKFNRTRKELPKAHWLDAANVGKSTPDVLFVKNIVPLLITATGHGRRQMCVTDSHAIGFPKQHKERHKTFLGYRTGDIVKAVTPKGTIRGRIAIRHRPSFRIGKVDIHPKYMRRLHRADGYEYQVKGVVALPPHS

SEQ ID NO: 20757 - protein, 406 aa, unidentified; identical to SEQ ID NO: 2752

SEQ ID NO: 20758 - protein, 420 aa, unidentified; identical to SEQ ID NO: 3685

SEQ ID NO: 20759 - protein, 425 aa, unidentified; identical to SEQ ID NO: 16974

SEQ ID NO: 20760 - protein, 424 aa, unidentified; identical to SEQ ID NO: 3434

SEQ ID NO: 20761 - protein, 420 aa, unidentified; identical to SEQ ID NO: 8840

SEQ ID NO: 20762 - protein, 557 aa, Blautia sp.; identical to SEQ ID NO: 7395

SEQ ID NO: 20763 - protein, 434 aa, Moorena sp.
MQNYVFVIDTNKQPLNPIPPKKARRLLNKGKAAVFRMYPFTIILKTAIRQSRRCANNNPSISPCQIKIDPGSKVTGFALVQNNQVIWGMELEHRGGLIKKKLESRGAVRRGRRNRNTRYRKPIFLNRKRPEGWLPPSLEHRILTIQTWVKRLIKFCPVNEIWVERVKFDTQKMQNPEISGIQYQQGELAGYEVREYLLEKWGRECTYCGKQSVPLQIEHIHPRSLGGSDSALPTLRERVSNLCLACEKCNQRKGNKPIEDFLKKKPSLLQKIKSKAKQPLKDATAVNATRNKLVKVLQLIKVVVTGTGAQTKYNRTRLELPKQHWIDAACVGDIETLVLRTSQPLLVTCKGPGGRQKAALNKYGYPIRHNPLKPIKGWVTGDIAKHQKLGIGKVTPRSKGSFGFTPLGTKGYKSCKPQDISAIYRKDGYTYSFC

SEQ ID NO: 20764 - protein, 426 aa, unidentified; identical to SEQ ID NO: 6604

SEQ ID NO: 20765 - protein, 518 aa, unidentified; identical to SEQ ID NO: 19733

SEQ ID NO: 20766 - protein, 451 aa, Akkermansia sp.; identical to SEQ ID NO: 18640

SEQ ID NO: 20767 - protein, 560 aa, Streptomyces sp.; identical to SEQ ID NO: 7645

SEQ ID NO: 20768 - protein, 332 aa, Erysipelotrichaceae sp.
MAPSLRHRRENQINLFESFCKVMPITSATFEMGKFDTQLLQAIADGKPLPEGKDYQQGSKYLFQTEREAVFSRDHYTCQVCGKSIKDGVILHTHHIGYWKGYRSNRISNLLTVCEHCHTAKNHKPGGALWGLEPKSTNLAAATYMSIVRWAIYRELLLKHPEVDLHIQYGAKTSVTRKSLHLAKTHANDAYCIGSLHPRHRTAELVYQKKRRNNRILAKFYDAKYIDIRDGKKKSGSLLSCGRTNRRESRRSDKNQRIYRGKKCSSGRTSVRKNRYAYQPGDTIVFHSQTFVVNGSHCKGTRVILGTGKSVKATDLTCIKKEGGWRFLPAQA

SEQ ID NO: 20769 - protein, 338 aa, unidentified
TEEIKLESIYFEQTRKTADAGYKHVGLSASTEKAELYASQVELRQDITDLLSARRALRRARRNRKTRYRAPRFDNRIRTKCEGWLAPSVENRINAYLSRIEAVLRLLPITKITVETASFDTQLLKSPDIAGEEYQKGEQLGFWNVREYVLFRDGHVCQHCHGRSKDPVLNVHHLESRRTGGDSPDNLLTLCETCHKALHRGEITLKTKRGQSFRAQAFMGIMRWVVLDRLKASHPKLEVQNTYGYRTKHARISNGIAKSHCADAFCIAGNLGAERLGELFFQKQTRRNNRQIHKLSILKCGIRKRNQAPFEAKGFRLFDKVARKGEEGFIFGRRSSKT

SEQ ID NO: 20770 - protein, 427 aa, Parasutterella sp.; identical to SEQ ID NO: 6379

SEQ ID NO: 20771 - protein, 413 aa, unidentified
LKVFVLNMRGKPLMPCSPAKARHMLKAGKAVVVRRTPFTIKLTIATGETKQDVTLGVDAGARHVGISATTEKEEVFASEVALRQDITGLLADRLAFRRARRNRKTRYRAPRFNNRVRSKHKGWLAPSVENRIQAHISRIEAVCRLLPVTKIVIETASFDIQKIRNPEVEGTGYQQGDQLGFWNVREYVLFRDGHICQHCRGRSKDPILNVHHLESRKTGGDAPNNLITLCETCHKAYHAGKIKLKVKRGHSFRAEAFMGIMRWTLLNRMRKAHPSLPVENTYGYLTKHKRIALGLPKTHCADAFCIAGNLKALRRGDFLFQQQTRKHNRQIHKCSILKGGVRKLNQAPFLVKGFRLFDKVRIGGQIGFVFGRRVRGTFNIRRLDKTVIGTDINCKKLSLLETRKTFLTELRKE

SEQ ID NO: 20772 - protein, 393 aa, unidentified
LRVFVLNKRGKPLMPCSPAKARLLLKEKKAIVVRRTPFTIQLTIATGESKQPVSLGVDAGYKHVGLSASTEKAELYASEVELRQDITDLLSARRALRQSRRNRKTRYRAPRFDNRIRTKRKGWLAPSVENRINAHLSRIEAVLRLLPVTKITVETASFDLQLLKNPDISGKEYQEGEQLGFWNVREYVLFRDGHVCQHCHGRSKDPVLNVHHLESRRTGGDSPGNLITLCETCHKALHRGEITLKAKRGQSFRAEAFMGIMRWEVLNRLKASHPELEVNNTYGYWTKHARIANGIAKSHCADAFCIAGNLGAERLGEFFFQKQTRRNNRQIHKLSILKGGIRKRNQAPFEAKGFRLFDKVACQGEEGFIFGRRSSGFFDVRKLDGTRISAGIS

SEQ ID NO: 20773 - protein, 428 aa, unidentified; identical to SEQ ID NO: 5055

SEQ ID NO: 20774 - protein, 470 aa, unidentified; identical to SEQ ID NO: 2825

SEQ ID NO: 20775 - protein, 408 aa, unidentified
MVYVQDINGKPLMPTTRHGKVRRLLKDKKAVVVNLCPFTIKLTYVTSDYKQEIVLGVDAGTKHVGLSATTKSKELYSSEVILRNDIVDLLSTRRELRRTRRNRLRYRKSRFDNRIKSRRPGWIAPSVRYKIDAHIRVIDNVCSILPISRIVIEVAQFDTQKIKNPNISGKEYQEGDQLGFWNTREYVLCRDGHKCQYCKGKSKDSILNVHHIESRKTGGDSPSNLITLCETCHKEYHKGNIDLKIRRGKSLRDAAVMGIMKWRLYEKLKSKYGCVSMTFGYVTKYNRIHNNIEKSHVSDAFVISKNFNAIRLGYYYKIRLVRRHNRQIHKQKIQKGGIKRLNQSPFEVFGFRLFDRIMFENSYYFIFGRRKIGRFNIRDIDGKSQRDITYSKLKLSRCKRFMIQKEMN

SEQ ID NO: 20776 - protein, 627 aa, unidentified; identical to SEQ ID NO: 7833

SEQ ID NO: 20777 - protein, 427 aa, unidentified; identical to SEQ ID NO: 3216

SEQ ID NO: 20778 - protein, 371 aa, unidentified
  REGION 1..371: note = IscB polypeptide
MEVYVLNKEGQPLMPTRPVIARLLLKEGKAKCIRRTPFTIKLLVDTTEYKQEVVAGMDTGSKTIGCAAIANGKVVYQSEVQIRQDVSKKMEQRKMYRRNRRGRKTRYRKARWQNRASMREEGRLAPSIKSKVDSHLREKKFVESILPVSTFKVETASFDIHKISNPDVGKWQYQKGQQKDFYNVKAYVLHRDGYQCQKCKTKKGKLHVHHVVFKSNGGTNSPDNLIVLCSDCHDKLHKGEFEIKGTRSKTKHATEVGIVKSQLKKQFGNFEETFGYETKYKREQILGLPKTHYFDAVAICCEESEIVELSDSVHFKKHVAKGDYQQTKGSRSEKKIPTGKLFGLRKFDYIKTPNGIGFVKGKRSTGFFCYI

SEQ ID NO: 20779 - protein, 477 aa, Acidithiobacillus sp.; identical to SEQ ID NO: 3862

SEQ ID NO: 20780 - protein, 417 aa, unidentified; identical to SEQ ID NO: 15591

SEQ ID NO: 20781 - protein, 427 aa, unidentified
MPCRPARARRLLRAGRARVVKRFPFVIRLVDRTVEQSEVQPALIKLDPGSRETGAAVVRDDGKKRHHALAFFVIEHRGGAIRDALKARSAFRRRRRSQNLRCRSPRFLNRVKPKGWLPPSLRHRVETTLSFVRRMCRYLPVSGIATELVKFDSQKLQNPEVSGVEYQQGTLFEYEVREYLLEKFGRKCVYCGAEGVPLNIDHVVPRAKGGSNRVSNLVLACMSCNQKKGARSLEDFLKGKPKVLARVRRELKTPLRDAAAVNATRWVLFNELKATGLPVETGSGALTKLNRHAFGVEKEHWLDALCVGRLNGVVTRKGLNVLEIRCMGRGSRQRTRLTKYGFPRGYLMRQKCVHGFATGDMVEANVPKGKKAGLWRGRVAVRVSGSFNIQTPKGVIQGVGWKHCRLISHNDGYGYAWLGHAPHSSPA

SEQ ID NO: 20782 - protein, 470 aa, unidentified; identical to SEQ ID NO: 2825

SEQ ID NO: 20783 - protein, 388 aa, unidentified
LVYGSSGYTQEVILGVDAGSKTIGMSASTTKEELLSAEVKPRNDVVDLLSTRREFRRVRRNRKTRYRKPRFDNRVRSKHKEWLAPSVEVKIQEHITSIKRVCRILPVSKVVIETAEFDLQLLKAIADGKSVPQGEDYQKGEMYGHYNVRQYVLWRDNYTCQCCGAHATKKKEVRLHVHHLESRKVGGDAPSNLITLCDSCHEKFHKGIITAANLKKRKRRSMRDATFMGIMRKTLIQRLRAELTIPVAETRGYITKTTREKLLVLPKSHTNDALAIALGKHGFNVGYLPEIAQIDKIYTIRPVRHHNRQLHKVTILKGGIRKSNQAEKYVFGYRLFDKVQFNGQDCFIWGRRTTGIFTIKTINGKMIKDGISFKKLKPVEKSTSYLIA

SEQ ID NO: 20784 - protein, 435 aa, unidentified; identical to SEQ ID NO: 4695

SEQ ID NO: 20785 - protein, 396 aa, unidentified; identical to SEQ ID NO: 5072

SEQ ID NO: 20786 - protein, 423 aa, Arthrospira sp.; identical to SEQ ID NO: 2900

SEQ ID NO: 20787 - protein, 318 aa, Parasutterella sp.; identical to SEQ ID NO: 12461

SEQ ID NO: 20788 - protein, 429 aa, unidentified
QNKQRKARKDHTEIQNGKDDICRATISCKSVQISYPTAEESVTHKIIRGKEGKFANRHRDGDWITPSARQLVQMHMNDLKSICKILPISHVTLERVAFDFQKLENENIKAWEYGKGKLYGYDSPEEYIHDVQDGKCLVCGKPHIDYLHHIIPRSKGGSDKVSNIAGLCYDCHYGPIGVHNCQDTQDRLPELKNEVNKQYKVSLLNSVMPVLIEEIDKFCKANSIMFSICEGHDTAKVRDMYDLQKDHCLDGFAISLVGRNVKSVDVMPDRIHQKQRYKKKSKNIIQKRNYREYYDDKKLVAINRHKGTDQKADSLEEYMNTYAETHTADECKMHFESLTVKPARRTYTFHKEGRICPLHIGDKVRYEKKNKIKGNTKVDTFICEGIYFSKDENKAKVEHNKTKSKKMKFCRAIESGCIPYIDYIKLALI

SEQ ID NO: 20789 - protein, 417 aa, unidentified
MPCSPAKARLLLKEKKASVKRRTPFTIQLTIATGEAKQPVTLGVDSGYKHIGLSATTEKAELYASQVELRQDITDLLSTRLALRRSRRSRKTRYRAPRFDNRVASKREGWLAPSVENRIAAHMSRVEAVMRVLPVTAITVETAAFDTQLLKNPDITGAAYQQGEQLGFWNVREYVLFRDGHVCQHCRGKSKDPILNVHHIESRRTGGDAPNNLITLCETCHKAFHRGEIELKVKRGKSFKAETFMGIMRWTLFERLKKSHPELSVRNTYGYLTKHKRISHGITKSHCADAYCIADNLGAKRLEGFFFQKQTRKHNRQIHKLSILKGGLRKKNQAPYEVKGFRLFDKVICKGEEAFIFGRRTSGSFDVRRLDGTRISAGINCKKLRLLEPRTTYLTEFRKEAALPPLHECRGFRAEFL

SEQ ID NO: 20790 - protein, 408 aa, unidentified
MVYVQDINGKPMMPTTRHGKVRRLLKDKKAVVVNLCPFTIRLTYVTSDYKQEIVLGVDAGTKHVGLSATTKSKELYSSEVILRSDIVDLLSTRRELRKTRRNRLRYRKPRFDNRVKSKRSGWIAPSVKYKVDAHIRVVENVCSILPISRIVIEVAQFDTQKIKNPEISGKEYQEGDQLGFWNVREYVLARDGHKCQYCKGKSKDKILNVHHIESRKTGGDSPYNLITLCETCHKEYHKGNIDLKIRRGKSLRDAAVMGIMKWRLYEELKSKYDNISMTFGYVTKYNRIKHGIEKSHVSDAFVISKNFNAIRLGYYYKVRLVRRHNRQIHKQKIPKGGVKRLNQSPFEVFGFRLFDRVMFENSYYFIFGRRKTGRFNIRDIDGKNQRDITYKKLKLSRCKCFMVQNEMN

SEQ ID NO: 20791 - protein, 422 aa, unidentified
MANNIEYCFVIDKDNQPLAPTKANKGWYLIRKSRAKLKSMYPMVIQLNKKVESNENDKSYMACGIDDGSVHVGLAIVQKCPTKNKVVFKGTIEQRQDVKHLMDTRRGYRQYHRYHKRHRPARFNNRSSSKRIGRLVPSIKQKKDAILRVLYQLNKWIYIKEYYLEDVCIDIRSMTDNYKPYKWQYQKSNRLDENLRKAAIIRDNYKCQECGKSNCKLEVHHIRARKYHGADTIGNLITLCSKCHEKTEGKEKDFEDKYFKMINSKPKRFDYAMHVMQGKNYLRNKISKLGLLHLTNGGTTANKRIEWNIEKSHSNDAICITSSIPDFCNIKEWTIKPIRRKSKAKTDNVLGIKHRDLVSYTYKNGETHRFYQQVGKQYSYNKGIAELSEIDQLKLELQRKEAELEILKKYKELERKCRLKQL

SEQ ID NO: 20792 - protein, 419 aa, unidentified
MQYVYVLNKHGEPLMPCSPGKARLLLKQQKACVVKRTPFTIKLLFGSAGYKQPITLGVDAGSKHVGLSASTEKRELYSEEFTPRSDVVELLSTRRQNRRSRRNRKTRYRVPRFDNRVHSKHKGWLAPSVEVKIQEHITVIKHICKILPISLVRVETAEFDTQRLKAMLAGKPLPVGTDYQLGEMYDEYNVRQYVLKRDNYTCQCCGAHTTAKKLVKHVHHLESRKTGGNAPSNLVTLCTTCHKNLHKGKVTLDGKERGKPLRDAAFMGIMRKTLMARLKEELPIPVQGTYGYITKMRREQNDIKKSHTNDARCISKHPLAEPCSVCYRTKAIRHHNRQTHKANFSKKGIRKRSQMPYLVEGYRLWDKVLYKEQECFVSGRRSSGSFTLKKLDGTSVSKGVTFKKLRLLEPATNYLIERM

SEQ ID NO: 20793 - protein, 417 aa, unidentified
MPCSPAKARLLLKERKAIVKRRTPFTIQLTIATGEAKQPVTLGVDSGYKHIGLSATTEKAELYASEVELRQDITDLLSARLALRRSRRSRKTRYRAPRFDNRVASKRKGRLAPSVENRITAHMSRVEAVMRVLPVTAITVETAAFDTQLLKNPDITGAAYQQGEQLRFWNVREYVLFRDGHVCQHCRGKSKDPILNVHHIESRRTGGDAPNNLITLCETCHKAFHRGEIKLKVKRGKSFKAETFMGIMRWTLFERLKKAHPELSVRHTHGYLTKHKRISHGIAKSHCADAYCIAGNLGAMRLNSYLFQKQTRKHNRQIHKLSILKGGLRKKNQAPYEVKGFRLFDKVICKGEEAFIFGRRTSGSFDVRRLDGTRISAGISYKKLRLLEPRTTYLTEFRKEAALPPLHKCRGFCAEFL

SEQ ID NO: 20794 - protein, 323 aa, unidentified
TRYRAPRFDNRIRTKRKGWLAPSVENRINAHLSRIEAVLRLLPVTKITVETASFDLQLLKNPDISGKEYQEGEQLGFWNIREYVLCRDGHVCQHCYGRSKDPVLNVHHLESRRTGGDSPGNLITLCETCHKALHRGEITLKAKRGQSFRAEAFMGIMRWEVLGRLKASHPELEVNNTYGYRTKHARIANDIAKSHCADAFCIAGNLGAERLGEFFFQKQTRRNNRQIHKLSILKGGIRKRNQAPFEVKGFRLFDKVACQGEEGFIFGRRSTGYFDVRKLDGTCISAGISYKKLHLLEKRRTYLTEIRKEEALPPPPEGRGLRA

SEQ ID NO: 20795 - protein, 420 aa, unidentified; identical to SEQ ID NO: 18438

SEQ ID NO: 20796 - protein, 447 aa, unidentified; identical to SEQ ID NO: 13565

SEQ ID NO: 20797 - protein, 458 aa, unidentified
MEVLNVVYVLSVEGNPLMPTKRHGKVRRLLKQQLAKVVKVKPFTIQLLYETTSYTQNITLGIDSGYNYIGFSAVTEKEELICGEVKLRNDISELLKERRMYRRIRRNRLRYRKPRFDNRISSKKEGWLAPSIKHKLDSHVRFINYLKKILPIANIVVEVANFDTHKLKNPNVVGKGYQQGEQQDFWNVREYVLYRDNYTCQLCGKKNTILEVHHIGYWKQDRTDRPGNLITLCAKCHNSNNHKDGGKLYGMKPVQKPLKDATFMSTIRWKLVNALMCDYTYGYITKSKRVSLGLEKTHYNDAFCIAGGINQQRIEPIYFEQIRRNNRSVEKFYDAKYVDIRDKSIKTGQELFCGRRTRNKNLNEENLHKYRGAKKSKGRRNIRKQRYAYQPKDIVTFESKKYSVQGVQNKGEYIKLMEMSKPVKTDLVKPYMFRKGFSMFYNCNSSPTYRSGSLLAGK

SEQ ID NO: 20798 - protein, 418 aa, unidentified; identical to SEQ ID NO: 4950

SEQ ID NO: 20799 - protein, 490 aa, unidentified
MYVVYVLNRQGKPLMPTKRFGHVRRMLKTGKAKAISTRPFVIQLQYASTDFVQPLYGGTDPGRTNIGEAVLNNKGEVVYAAHVITRNKEIPKLMADRATHRRASRRGERLRRKRRAKANGTMTCFPEGRKLPGYKDGVLELKDIINTESRFNNRKRPAGWLTPTARQCIQTHLNMVQNICKILPVTDWTLEYNRFAFMQLEDGSVRGWGFQNGRLKGYANKEDYIYALQGGVCICCGAPIEHYHHIKPRHKGGSNTPENLVGLCSVCHAEIHTGKRNLDKIGKYKKYAGTSIVNIAIPFIWDGIVKMFGNKAHICEGQETAELRRANNISKEHFTDAVCIAGIGLDITPQYDNNQPFELRQFRCHDRSYIKAQVERTYMDGKTIVAKNRKPRFGQKGDALSDLQSKITEEHGELAARRAVSKLVVKKSYRRYNALERIKPSAVFMFSNKKYLLSGQLTNGMYYRAFGKGTKNFSSINCEVISSGYSLTYM

SEQ ID NO: 20800 - protein, 470 aa, unidentified; identical to SEQ ID NO: 2825

SEQ ID NO: 20801 - protein, 422 aa, unidentified
LNKRGKPLMPCSPAKARLLLKEKKAIVKRRTPFTIQLTIATGETKQPVGLGVDAGYKHVGLSASTDKAELYASQVELRQDITDLLSARRALRRARRNRKTRYRAPRFNNRIRTKRKGWLAPSVENRINAHLSRIEAVLRLLPVTKITVETASFDMLLLKNPDIAGKEYQEGEQLGFWNVREYVLFRDGHVCQHCYGRSKDPVLNVHHLESRRTGGDSPGNLITLCETCHEALHRGEIALKTKRGHSFRAEAFMGMMRWEVLNRLKASHSELEVNNTYGYRTKHARIVNGIDKSHCADAFCIAGNLGAERLCEFFFQKQTRRNNRQIHKLSILKGGIRKRNQAPFEIKGFRLFDKVACKGEESFIFGRRSSGYFDVRKLDGTRISAGISCKKLRLLEKRRTYLTEIRKEEALPPLPEGRGLRA

SEQ ID NO: 20802 - protein, 456 aa, unidentified
MSTCVCVLSNNGERLMPTFRLGKVRRLLKDGKAKIVKHHPFTIQLLYDSKTNTQPIEICEDVGYNYIGISAKSKSHEYVSAQYDTLQDEKEHHDDCRKMRRTRRNRLRYRKPRFDNRKCDKGWLAPSLEHKKQLNISLIERYVSVIPITHATVEVGSFDTMLLQAIQKGKAKPESADYQKGPHYNLATLREAVFYRDNYTCQVCKRKIADGAILHMHHMFYWKGRHGYQLDELATVCEKCHTPANHQKGGKLFGFGEGKEFADLSGAAFMNTVRWQIVDALYTTYDKEFVTITYGAMTKEKRIALQLEKTHNNDAYAMGDYHPACRGKFRHYQKRRRNNRVLEKFYDATYIDARTGNKAKGKELFNGRINRNHKKDSENLHKYRSKKVSKGRRSIRRRRYAIQSYDTVRLEGKTYITSGCHNKGTRLLIPVNGKSKSVAISKVQVVCHAGAWIQIS

SEQ ID NO: 20803 - protein, 421 aa, unidentified; identical to SEQ ID NO: 17429

SEQ ID NO: 20804 - protein, 426 aa, Anoxybacillus sp.; identical to SEQ ID NO: 17233

SEQ ID NO: 20805 - protein, 450 aa, Clostridium sp.; identical to SEQ ID NO: 2935

SEQ ID NO: 20806 - protein, 426 aa, unidentified; identical to SEQ ID NO: 14562

SEQ ID NO: 20807 - protein, 470 aa, unidentified; identical to SEQ ID NO: 2825

SEQ ID NO: 20808 - protein, 425 aa, Tolypothrix sp.; identical to SEQ ID NO: 3714

SEQ ID NO: 20809 - protein, 428 aa, unidentified; identical to SEQ ID NO: 11642

SEQ ID NO: 20810 - protein, 515 aa, unidentified
MTFNERRHLMPQIYVLGMDGKPQMPTTRRRHVQKLLDTGKARIAEHVPLTIQLLYDNDPVLQPVTLAEDPGRTNIGLAIMDLKGNLLLSAVVETRNKEIAKLMEKRRQCRRASRNGERKARQRLAKKYGTMIKAGMMMRKLPQYAAEKFITCKIIRNTESRFCNRKRKDGWLTPSARHLVQTHVNLVHKIQKYLPVTDVALEVNRFAFMLLEDPSVCGVDFQNGPLKGYDDRDAVVYDLQDGKCLMCKNEITQYHHIVPRSRNGSNTINNIAGLCDKCHDRVHKDADFAKQLKDKKAGLDKKYGALSVLNQAIPFICQKLEAEFGKEHVHYCTGRETSLVRRSIGYHKTKKNQVHEVDAWCIGALSLKQIPEDVPDFKDVHLIKQFRRQDRSLIKAQTERVYKLDGKTVAKNRKKRTGQETDSLEDWYNRQVETYGKQAADRMRSQLKVTESRRRYNNPDRMMPGAVFLYQGVRYVMRGQHCKGAYLQAVGMGNKDFSAKECKIVTQNTGLVFVS

SEQ ID NO: 20811 - protein, 406 aa, unidentified; identical to SEQ ID NO: 18812

SEQ ID NO: 20812 - protein, 420 aa, unidentified; identical to SEQ ID NO: 18320

SEQ ID NO: 20813 - protein, 506 aa, unidentified
MPYIYVLGMDGKPQMPTTRRRHVQRLLDTGRARIASHVPFTIQLLYKNDPILQPVTLAEDPGRTNIGLAALSLKGDLLFSAKVETRNKEISKLMDKRRQSRRASRNGERKARQRLAKKFGTMLKAGMLMRKLPQYAADKYITCHVIRNTQARFSNRKRPDGWLTPSARHLIQTHINLVHKMMKYLPVTDVVLEVNRFAFMQLEDPSISGVDFQNGPLKGFDDLHAAVRDLQDGKCMLCKNEIQDFHHIVPRSRHGSNTIGNIAGLCTKCHEKVHKDEKAEKRLKDKKKGLDKKYGALSILNQAIPFICKELETEFGKEHVHYCTGRETALVRRSLRYHKTKEEQYHEVDAWCIGALSLDRIPEKAPAFEEVHTIMQFRRQDRASIKAQTSRTYKLDGETVAWNRKKRTDQKNDSLEDWYQKQVQIHGQKEADRMRSRLTVKISQRRYNNLERMLPGAVFLYKGKRYVMKGQHSNGKYLRAVGDGKTNYPVKECRIGKRNQGLVFID

SEQ ID NO: 20814 - protein, 512 aa, unidentified; identical to SEQ ID NO: 8797

SEQ ID NO: 20815 - protein, 416 aa, unidentified; identical to SEQ ID NO: 6135

SEQ ID NO: 20816 - protein, 450 aa, Clostridium sp.; identical to SEQ ID NO: 17680

SEQ ID NO: 20817 - protein, 470 aa, Rhodanobacter sp.; identical to SEQ ID NO: 3168

SEQ ID NO: 20818 - protein, 457 aa, unidentified; identical to SEQ ID NO: 3236

SEQ ID NO: 20819 - protein, 476 aa, unidentified
LAASGTEGVSHPGLPGKYKHKGGQLMSVAVISKTGERLMPTSEYRARKLLKSGKAIKHSYHPFTIQLTGRETGDIQPIELCMDTGYIHIGISVKSEKHEYLAEQIDTLTDERGRHDACRMYRRQRRSRKRYRQARFNNRKRDQGWIAPSLEHKKKIHIQAISRINNVMPITDITLEMGNFDTQVLKAKEEGKPLPHGADYQHGGRYGIATLREAVFSRDGYKCQCCGRTIKDGVILHIHHIKYRSQGGTNSMSNLATVCDKCHTPKNHKPGGKLYNWKPKLSSFKGATFMTAIRWQLYNEVKALFPDIDIHITYGAATKERRRKLDIDKSHVNDAFVMGQFHPKHRIKAILCKKKRRNNRCLEKFYDAKYIDSRDGKKRSGQELFNGRINRNHKKNSENLHQYRLQKVTAGKRTVRKQHYKIQPHDIVIYENRKRETAGCHCNGTRMMLLPDKKSASIKKVKIYKYAGGYFKSAFN

SEQ ID NO: 20820 - protein, 431 aa, unidentified
MPNKVYVINKHGRPLMPCSPAKARHLLDEGKAKIKKRTPFTIQLVYGSSGYTQEVILGVDAGSKTIGMSASTTKEELLSAEVKPRNDVVDLLSTRREFRRVRRNRKTRYRKPRFDNRVRSKHKEWLAPSVEVKIQEHITSIKRVCRILPVSKVVIETAEFDLQLLKAIADGKPVPQGEDYQKGEMYGHYNVRQYVLWRDDYTCQCCGAHATKKKEVRLHVHHLESRKVGGDAPSNLITLCDSCHEKFHKGIITAANLKKRKRRSMRDATFMGIMRKTLMQRLCSELPIPVVETRGYITKATREKLLVLPKSHTNDALAIAQGKHGFNVGYLPEIAQIDKIYTIRPVRHHNRQLHKVTILKGGIRKSNQAEKYVFGYRLFDKVQFNGQDCFIWGRRTTGIFTIKTINGKMIKDGISFKKLKLVEKSTSYLIA

SEQ ID NO: 20821 - protein, 420 aa, unidentified; identical to SEQ ID NO: 3617

SEQ ID NO: 20822 - protein, 344 aa, Desulfobacter sp.
LSVFVLDTNKKPQNPIHPAKARLLLTEGTAAVFRQFPFTIILKEKVLDVASNPLRIKIDPGSRETGIAVINDDYRGQQIKNNLESRRAIRRSRRNRKTRYRKPRFDNRTRAKGCLPPSLKSRVHNIETWVNRLCRFCNIQAISMELVRFDMQKIQKNSSFQGKPGLLKRIQKQSKVPLKDAGAVNTTRWDLFRTLKKTGLPVETGSGGLTKFNRTTRGLHKTHWLDAACVGKSTPEKMFQIDKTVLILKADGHGSRQMCRVNRFGFPRTTAKSTEKKVKGFQTGDIVKAVVTSGKKVGTYTGRVAVRKSGSFNIKTVDKTVQGISWKYCRLLHASDGYSYNTTC

SEQ ID NO: 20823 - protein, 408 aa, unidentified; identical to SEQ ID NO: 11651

SEQ ID NO: 20824 - protein, 426 aa, unidentified; identical to SEQ ID NO: 3614

SEQ ID NO: 20825 - protein, 423 aa, Microcoleus sp.; identical to SEQ ID NO: 19649

SEQ ID NO: 20826 - protein, 442 aa, unidentified; identical to SEQ ID NO: 2903

SEQ ID NO: 20827 - protein, 426 aa, Moorena sp.
MRVFVLDKNKKALDPCHPARARKLLSSGRAKVFRRYPFTIIVQEKEAENCITHPHRLKIDPGAKTTGIAIVQGSRVVWGAELTHRGSQIRESLTSRRQLRRTRRSRKTRYRKPRFLNRTRATGWLAPSLQSRVDNILTWVKKLCRYCPITDISQELVRFDTQAMQNPSINGYEYQLGALAGYEVREFILEKWQRTCAYCGAKNTPLEIDHIKPKSKGGSNRLSNLTLACRPCNEKKGNQVLEQFLAKKPDLLSIILSMAKKPLAEATAVNSTRWKLYENLKATELPVEVGSGGLTKYNRSRHNLPKTHCLDAANVGKSTPEKLILEVNQPLLITAKGHGRRQQCRTDKYGFPKRYCSKQKVHFGFRTGDIVKANVTKGKKIGTYVGRVATRASGSFNISTKNRFVQGISHKYCQIVQGKDGYQYAF

SEQ ID NO: 20828 - protein, 515 aa, unidentified
MIPNERRHLMPYIYVIGMNGKPQMPTTRRRHVQKLLDTGKARITERVPFTIQLLYDNDPVLQPVILAEDPGRTNIGVATLDLKGNLLLSAAVETRNKEIAKLMEKRRQCRRASRNGERKARQRLAKKYGTMIQAGMRMRKLPQYAADAFITCKVIRNTQARFCNRRRLDGWLTPSARHLVQTHINLVHKVQKYLPVTDVAIEVNRFAFMQLEAPAICGVDFQTGPLKGYDDRDAAVYDLQDGKCLMCKHEITQYHHIVPRSRNGSNTIGNIAGLCDQCHDRVHKDADFAEQMKEKKEGMDKKYGALSVLNQAIPFICKQLETEFGRGHVHYCTGRETSLVRQSTGYQKTRKNQLHEVDAWCIGALALAEIPENVPDFKEIHLIRQFRRQDRSLVNAQTERVYKLGGKMVAKNRKKRTGQEIDALEDWYNRQVETYGKQEADCMRSRLKVTKSRRRYNNPNRMMPGAVFLYEGVRYVMRGQHSKGAYLQAVGMENRDFPVRKCKILTRNTGLVFVS

SEQ ID NO: 20829 - protein, 512 aa, unidentified
MSTIYVLNKDGKPLMPTTRGGHVRHLLKEQKARVVQSNPFTIQLLYETDDAVQPLYLGIDPGRTNIGVAVVKTDGTAVFTAHLGTRNKEIPKLMQGRKKARRARRTNGRRCRRQRRAKANGTISKKCVKQDTAQNGSVSKRAKKIGVIKRHLPGCEKEVLCIGIKNKEAKFNNRTRPEGWLTPTANQLLQTHVNLVKKIQKFLPISDVVLEVNKFAFMQLDNPNIQKWQYQQGPLYKKESLESAVSEMQEHHCLFCKKPIDHYHHVVPQHKNGSNTIGNIVGLCTKHHDLVHKDSAWEKKLAKKSTGLYKKYAALGVLNQIIPALTNKLSVLFPKHFFVTTGKSTHDYRESHGVSKDHWLDAYCIACSALPGSVCDSDINNHVPYELKQFRRHDRRALHKENMSRVYTLNGKKVATNRHKAVEQTTDSLEDFRQCQPNDVCKLKVKEHHPTYRNMNRNYPGSVFLVDGQIHVMQGVGGSHNGKADGYYDTNSNAYPYYKCKFVAKNEGIVFA

SEQ ID NO: 20830 - protein, 470 aa, unidentified; identical to SEQ ID NO: 2949

SEQ ID NO: 20831 - protein, 406 aa, unidentified; identical to SEQ ID NO: 3567

SEQ ID NO: 20832 - protein, 435 aa, unidentified
MSYVFVLDTKKQPLNPVHPGRARWLLTQRKAAVFKRYPFTIILMSAAESPQVQPLRIKLDPGSQTTGIALVDDHSGQVLFAAELAHRGQQIKKALDTRRAVRHHRRARHTRYRKPRCDNRRRPKGWLAPSLLSRVSNVLTWVNRLRRLCPISAISMELVRFDVQAMENPEIEGCQYQQGTLAGYEVREYLLAKWGRTCAYCSKQNVPLQVEHIIPRAKGGTDRVSNLTLACEKCNRAKGSQDIAVFLKEKPDVLTRLLARAQGPLKDAAAVNATRWALYERLKDIGLPVECGSGGLTKFNRSTRNLPKTHWLDAACVGKSTPQTLQVKGIIPLLITSNGHGCRRMCSMDGTGFPRTKPKRKTFTHGFRTGDIVRALVPAHLNHAGIHVGRMSAKEKGGFTITTATGKITDVGKKYCRTLQRADGYGYVQPCAPAG

SEQ ID NO: 20833 - protein, 426 aa, unidentified
MFVYVLDMNGQPLMPTQRFGKVRRMLRDKKAKVIKRCPFTIRLLYEPETKIVQEVVLGVDTGSKHVGVACVGNSKVLYQSQVELREDIKKKMDSRRMYRRNRRFRKTRYRKARFLNRGNSIKKDRYCPTIVSKFHGHEREIKFCKKILPIKDIVLETGTFDTQLMEKPWLQEHKWAYQRGVNYGYSNAREHALVRDNYTCQCCGKKNCRLEVHHIVFRRNGGSDSLENLITLCEDCHKAVHLGEIDLKLKGKRRSTLRYATQMSIIRSMLLKKYPDAIETFGFVTKANRENLGIGKDHYLDACVIASGGLEFEPSDALYIKKCVSKQDRQLCKGIRGEKKTPTGKVFGFKKFDKVKYLGETCFIKGRRSSGAFVLMDIDNNAIDFRDRGGKQNPSYKSLKRLNTRKSILCIYKRIEGEVRFIPTLS

SEQ ID NO: 20834 - protein, 529 aa, unidentified; identical to SEQ ID NO: 6786

SEQ ID NO: 20835 - protein, 435 aa, unidentified
MDAWDIIVVLNKRGKPLMPCSPAKARLLLKEKKAIVKRRTPFTIQLTIATGEAKQPVSLGIDAGYKHVGLSASTEKAELYASEVELRQDITDLLSARRALRQSRRNRKTRYRAPRFDNRISTKRKGWLAPSVENRINAHLSRIEAVLRLLPVTKITVETASFDLQLLKNPDISGKEYQEGEQLGFWNIREYVLCRDGHVCQHCYGRSKDPVLNVHHLESRRTGGDSPDNLLTLCETCHKALHRGEITLKAKRGQSFRAEAFMGIMRWEVLDRLKASHPELEVNNTYGYRTKHARIANDIAKSHCADAFCIAGNLGAERLGEFFFQKQTRRNNRQIHKLSILKGGIRKRNQAPYEIKGFRLFDKVACQGEEGFIFGRRSSGFFDVRKLDGTRISAGISCKKLHLLEKRRTYLTEIRKEEALPPLPEGRGSAPKCDE

SEQ ID NO: 20836 - protein, 418 aa, unidentified; identical to SEQ ID NO: 7351

SEQ ID NO: 20837 - protein, 290 aa, unidentified; identical to SEQ ID NO: 18451

SEQ ID NO: 20838 - protein, 389 aa, unidentified; identical to SEQ ID NO: 11535

SEQ ID NO: 20839 - protein, 419 aa, unidentified; identical to SEQ ID NO: 4877

SEQ ID NO: 20840 - protein, 427 aa, Alistipes sp.; identical to SEQ ID NO: 18929

SEQ ID NO: 20841 - protein, 423 aa, unidentified
MQVVYVLNKDGLPLMPTHKLGKVRHFLKDGKAKIVKRTPFTIQLEYECENHIQPVTLGIDAGSKHIGLSASTEKIELYCSDVEIRNDIVELISTRRETRRTRRNHLRYRPARFNNRKASKPEEWLAPSVKQKVESHLKVVEEVHKILPVSKIVVEVASFDTQLLKAEAEGKTISGIEYQKGELSESWNTREYVLFRDNHTCCHCHGKSGDKVLEVHHLESRKTGGDAPSNLITLCKTCHENYHKGKIKLKQTRAEKYNDATFMGIMRWAFYNELKEIYFDVSLTYGYITKSNRIKYNLAKEHYNDAYCIAQNFKAEPLDKVIYQKKVRCHNRQIHKANFLKGGKKKLNQAPYTVKTFRLFDKVKYQNQECFIFGRRSSGYFDIRMLDGTKVNNSVSYKKLELLEARKNYLKEERSRQFLPPIN

SEQ ID NO: 20842 - protein, 416 aa, unidentified
MVYVLDKNGQPLMPTDRHRKVRLMLQSGQAKVIKRCPFTIQLNYDSGHQTQEISLGIDAGSKHIGVSATTKTRVLYEADVELRNDIVDLLSSRRELRRGRRNRKTRYRPARFDNRRREDGWLAPSIRQKIGTHLTVVENICKILPISRITVETASFDIQKIKNPDIQGAEYQQGDQLGFWNNREYVLFRDNHTCQCCKGKSKDKILNVHHIESRKTGGNAPNNLITLCEICHTGYHKGAIQLPKTVKRGMRFKDAAFMGIMRWAFYEALKQQYEPVGTPVHNTYGYITKHTRIAYNLPKEHYVDARCISGNPEASSNGEYYYQKKVRCHNRQIHKLTVLKGGIRKQNQATYLVKGYRLFDKVSYQGKGYFVFGRRQSGFFDIRTLSGEKVNKGSLSCKKLKFIATRTYYLTERRAV

SEQ ID NO: 20843 - protein, 408 aa, unidentified
  REGION 1..408: note = IscB polypeptide
MTQKVFVIDTDGRQLLPTHPARSRKLLQAGRAQVHQVVPFTIQLTRVVEDPVGAFTVGVDDGAKHVGIAMVNEHTKEVVFRGTVRLRQDVKRKMTQRAAYRRTRRSRKLRHRPARFLNRGRKGFLPPTIRQKKDSILRVIRDLGKVLHITKAVVEEGQFDISSLAAGRKLVGAEFQQSEYEGRNFRAKVLWRDRYKCTRCGFTEWLQAHHVKPKSVGGGNSPNNGLTLCRTCHKELHDGLWALTAKPKRFLYPAHLQAGKKYLREGLCSCGLAVSTCCGWMTKLWRDFIGLPKAHDFDAVAMVCRSYMPKIVKGAFTIIPRRTKVWEGNPTKKCHERRGFRHWDLVKASHRTRGIVVGSVRSLKKARLTLRTGWDINFPVSYRKTQLLWRPKGLVYISTLGLPCPRAL

SEQ ID NO: 20844 - protein, 458 aa, Anoxybacillus sp.
MVEENMTCFMQRKGENPMVFVLDTNKRPLAPCHEAVARKLLKQGKAAIYRRFPFTIILKKSVDESEIKATYRLKIDYGSRHTGLAILRGQEVVWLGQLDHRTDIKERIDKRRAFRRARRNRKTRYRKPRFLNRKRKEGWLPSSLESRVQNIQTWVNRLKKLCPIGYISYENAKFDTQLMRNPEINGVEYQQGTLQGYEVREYLLEKFGRKCCYCGKENVPLEVEHIIPKSRGGTDRVDNLCLACHDCNQRKGSKTAEEFGYPHIQKQVKESLKDASAINSTRWKAYEVLKQTGLDVECGTGARTKMNRIRLDLPKTHYFDACCVGESTTNHLYFKTKEVLFIKAKGRGSRSRTNLDRYGFPRGYLARQKFFFGFQTGDMVKAVVPRGKYQGVWFGEVACRKTGSFDIKGKDGKRIAQGINYRYVQVIQRFDGYAYGKGGRNLRKVQFLVVPKGRGFLA

SEQ ID NO: 20845 - protein, 428 aa, unidentified; identical to SEQ ID NO: 4606

SEQ ID NO: 20846 - protein, 413 aa, unidentified; identical to SEQ ID NO: 14501

SEQ ID NO: 20847 - protein, 373 aa, unidentified
DTLQDEKACHDSCRKLRRTRRNRLRYRKPRFDNRKRGEGWLAPSLEHKKQLNIRLIERYVSVIPITHATVEVGSFDTMLLQAIQKGKSKPEGVDYQKGPRYNLATLREAVFYRDNYTCQVCGRKIADGAILHMHHMFYWKGRHGYQLDELVTACEKCHTPANHQKGGKLFGFGEDKEFANLSGAAFMNAVRWQIVDALHATYGKEFVTITYGAMTKEKRIILGIEKTHNNDAYAMGDYHPVHRCVFRHYQKRRRNNRVLEKFYDATYIDTRTGNKAKGKELFNGRISRNHKKNSEDLHKYRSKKVSKGRRSIRRQRYAIQPYDTVRLESKTYITSGCHNKGTRLLIPANGKSKSVAISKVQVVCHAGAWIQII

SEQ ID NO: 20848 - protein, 335 aa, unidentified; identical to SEQ ID NO: 9848

SEQ ID NO: 20849 - protein, 533 aa, unidentified
MSTVYVLNKDGKPLMPTTRGGHVRHLLKEQKARVVRAKPFTIQLLYETNDVVQPLYLGIDPGRTNIGVAVVKANGTAVFTAHLETRNKGVPKLMQDRKKARRARRTNGRRCRRQRRAKANGTISKKCVKQDTAQSKNPSKRAKEIGIIKRRLPGYKKDVLCIGIKNKEAKYTNRTRPEGWLTPTANQLLQTHINLVRKMQKFLPISDVVLEVNKFAFMRLDNPDIQKWQYQQGPLYQKGSLENAVSEMQEHHCLFCDKPIDHYHHVVPQSENGSNTIANIVGLCAEHHNLVHKDAAWQKKLAEEKVGLNKKYGALSVLNQIIPALTNKLSVLFPKHFFVTAGKSTHDYRAAHGVSKDHWLDAYCIACSVLPSNVCDSNINNHVPYELKQFRRHDRRVLHKANMSRVYTLNGKAVATNRHKAIKQTTDSLEEFRQNYPDDVYKLKVKEHHPAYRNLNRNYPGSVFLVGKQAHVMQGIASSKDGKTTKYNDTNATTITAGKCKFVAKNSGILFVQCKFRKALSDGTTKKLQYPVR

SEQ ID NO: 20850 - protein, 465 aa, unidentified; identical to SEQ ID NO: 10277

SEQ ID NO: 20851 - protein, 420 aa, unidentified
MQYVYVLNKHGEPLMPCSPGKARILLKQQKACAVKRTPFTIKLLHGSAGYKQPVTLGVDAGSKHVGLSASTEKRELYSEEFTPRNDVVELLSTRRQNRRSRRNRKTRYRAPRFNNRVHSKHKGWLAPSVEVKIQEHITVIKRICRILPVTLVRVETAEFDTQRLKAMLAGKPLPVGTDYQLGEMYDEYNVRQYVLKRDNYTCQCCGAHTTAKKAVKLHVHHLESRKVGGNAPSNLITLCTACHDNLHKGKVTLDGKKRGKTLRDAAFMGIMRNTLLIRLRNELNIPVQNTYGYITKLLREQNDIKKSHINDARCISKHPLAEPCSVCYCTKAIRHHNRQIHKAKILNGGVRKTNQAPYIVKGFRLWDKVLYNGQECFISGRRSSGYFAIKKLDGTTITNSISFKKLRLLEPATNYLIERM

SEQ ID NO: 20852 - protein, 396 aa, unidentified
VVRRTPFTIQLTIATGESKQPVSLGVDAGYKHVGLSASTEKAELYASEVELRQDITDLLSARRALRQSRRNRKTRYRAPRFDNRISTKRKGWLAPSVENRINAHLSRIEAVLRLLPITKITVETASFDLQLLKNPDISGKEYQEGEQLGFWNIREYVLCRDGHVCQHCYGRSKDPVLNVHHLESRRTGGDSPGNLITLCETCHKALHRGEITLKPKRGQSFRAEAFMGIMRWEVLGRLKASHPELEVNNTYGYRTKHARIANDIAKSHCADAFCIAGNLGAERLGEFFFQKQTRRNNRQIHKLSILKGGIRKRNQAPYEIKGFRLFDKVACQGEEGFIFGRRSSGFFDVRKVDGTRISAGISYKKLHLLEKRRTYLTEIRKEEVLPPLPEGRGLRA

SEQ ID NO: 20853 - protein, 418 aa, unidentified; identical to SEQ ID NO: 6784

SEQ ID NO: 20854 - protein, 268 aa, unidentified
MCIRDRYQQGTLFEYEVREYLLEKFGRKCVYCGAEGVPLNIDHVVPRAKGGSNRVSNLVLACVSCNQKKGARSLEDFLKGKPEVLARVRRELKTPLRDAAAVNATRWVLFNELKATGLPVETGSGALTKLNRHAFGVEKEHWLDALCVGRLNGVVTRKGLNVLEIRCMGRGSRQRTRLTKYGFPRGYLMRQKCVHGFATGDMVEANVPKGKKAGLWRGRVAVRVSGSFNIQTPKGVIQGVGWKHCRLISHNDGYGYAWLGHAPHSSPA

SEQ ID NO: 20855 - protein, 264 aa, unidentified
  source 1..264: note = Euryarchaeota archaeon
MQKLLVEFENTSGDAPQVHCSVSEALNREETLSVPYKVLANNSSDEDQHSGKSGQVLSVPVINMHGKPLMPTTPRKARVLLQQGKSRVVQRSPFTIQLCYLTGNYTQNIKLGIDAGYSTIGFSAVTEKSELLSGELTLRKRISKLIEQKSNYRKTRRSRLWHRKPRFNNRSIITGWFAPSIQHKLETHLRLIEKLKKILPITKMTVEVASFDQQKLHNPEIKGIEYQQGELQGYEVREYLLEKWKHKCAYCGKRAQSHFLVIDE

SEQ ID NO: 20856 - protein, 440 aa, unidentified
MVLVIDKHKKPCNTVSNAYARVLLFKKQAVIHKRFPFTIRLKNDNAVLKNNSYVVKIDPGSKTTGVAITNDKDSVVMLAEIEHRGHVIKKNLDSRRAVRRKRRNRKTRYREARFDNRTRPEGWLAPSVKSRADNVINFIRKYKKLINIDKVMIESVSFDVAQMTSDDCLIGTGYQQGPLYQKKLRDFIFNKTNGRCSYCGAKATEIDHIIPRANGGTDSTFNLTPACRSCNEKKSNLSLKDFGKIMNKDYSHLEPKKLPKDAAIVQSARNYMAKEITKLVSDTAIYDAWLTKYNRDQLGLPKEHYYDALSVGEIPNKFNFLTNKVLIISAKGRSSRQMCRMDKYGFPRTSPKGSKFVEGFQTGDMVKAIVPNGLKRGEYLGKVAVRSSGQFNIQTKTKTIEGINHKYCHIIQRGDGYLYSYKECDFLSAINNRVSIAKIR

SEQ ID NO: 20857 - protein, 415 aa, unidentified
MVYVLANDGQPLMPTERHGKVCRMLKSGIAKVVKKCPFTIQLQYESERNVQPVALGIDAGSKHVGVSATTKAKVLYESDVELRDDIVKLLATRRQLRRRRRSRKTRYRPARFDNRRRKEGWLAPSIRQKIESHLTVVANACKILPINQIIVETASFDIQKIKDPEIQGIEYQQGEQMDFWNIREYVLFRDGHICQCCKGRSKDKILNVHHIESRKTGGNAPNNLITLCETCHKGYHNGTVILPKNIKHGMQFKDAAFMGIMRWTFYNTLKEQYEPDIPVSMTYGYLTKNTRIEHGLPKEHYIDARCISGNPDAVSDGTYYYQKKVRCHNRQIHKQTILKGGIRKSNQAEYLVRGFRLFDKVRYQGREYFIFGRRKSGFFDIRTLSGEKVNKGSISVKKLTFADTRKNYLIERRTV

SEQ ID NO: 20858 - protein, 497 aa, unidentified
LRDYMTPKKRKEASRMSEYIYVLGVDGDPQMPTKRKRHVEQLLQTGRARVFRQIPFTIQLTYENKPVLQPVTIAEDPGRSNIGMAVVSLSGELLSAAVVQTRNKEIVKLMDKRKQHRRASRNGERKARQRLAKKCHTMIKTGFLMRKLPMYGKDKRVKCLVIKNTESRFCNRKREDGWLTPSAEHLVQTHINLIHKMQKFLPITDVAIEINRFAFLSLEDPSISGVDFQKGPLKGYDDLNAAVEDLQDGHCLMCNSPIEHRHHIVPRSMQGSNTIGNIAGLCCKCHEKVHKDSAFEDSLKKKKAGLNKRYAAVSVLNQAIPFICKRLEQEFGKEHVHYCSGRDSSMVRRSLGYHKTKEEQLHEVDAWCIAVLSLQHVPEKAPEFDHVHEILQFRRQDRSRIKAQTSRAYYHEGKKIAKNRKKAEGQKDDSLQGWRKRQVERYGEEQTRKMISQLKVKKSIRRYNRLDRLMPGAVFYYQGVRYVMRGQHCEGTYLQAV

SEQ ID NO: 20859 - protein, 430 aa, Microvirga sp.; identical to SEQ ID NO: 7723

SEQ ID NO: 20860 - protein, 442 aa, unidentified; identical to SEQ ID NO: 10720

SEQ ID NO: 20861 - protein, 407 aa, unidentified
MPCSPAKARLLLKEKKAIVKRRTPFTIQLTIATGEAKQPVALGVDSGYKHIGLSATTEKAELYASEVELRQDITDLLSVRLALRRSRRSRKTRYRAPRFDNRVASKREGWLAPSVENRIAAHMSRVEAVMRVLPVTAITIETAAFDTQLLKNPDIAGAAYQQGEQLGFWNVREYVLFRDGHVCQHCRGKSKDPILNVHHIESRRTGGDAPNNLITLCETCHKAFHRGEIKLKVKRGKSFKAETFMGIMRWTLFERLKKAHPELRVRNTYGYLTKHKRISHGIAKSHCADAYCIADNLGAKRLEGFFFQKQTRKHNRQIHKLSILKGGLRKKNQAPYEVKGFRLFDKVICKGEEAFIFGRRTSGSFDVRRLDGTRISDGISNKKLRLLESRTTYLTEFRKEAALPPRA

SEQ ID NO: 20862 - protein, 475 aa, unidentified; identical to SEQ ID NO: 4985

SEQ ID NO: 20863 - protein, 428 aa, unidentified
LKVFVLNMRGQPLMPCSPAKARHLLKAGKAVVKRRTPFTIQLRIATGETKQNVTLGVDAGAKHVGLSATTEKEEVFASEVELRQDITGLLAARLSLRRDRRHRKTRYRAPRFLNRVRSKHKGWLAPSVENRIQAHMSRIDAVCRLLPVTKIVIETASFDIQKIKDPSVEGTDYQQGDQLGFWNVREYVLFRDGHVCQHCHGRSKDKILNVHHLESRQTGGDAPNNLITLCETCHKAYHAGKIKLKVKRGQSFRAEAFMGIMRWTLLDRVRKAHPGLPVENTYGYLTKHTRITHGLPKTHCVDAYCIAGNLKAVRRGVYLHQRQMRKHNRQIHKFTVLSKRLEDGTKIGYRKLNQSPYLVHGFRLFDKVRCLGQIGFIFGRRSSGYFDVRRLDGVKLSPSISWRKLTLLEKRSTYLTELRKEDGASSPV

SEQ ID NO: 20864 - protein, 442 aa, unidentified; identical to SEQ ID NO: 4653

SEQ ID NO: 20865 - protein, 418 aa, unidentified; identical to SEQ ID NO: 17178

SEQ ID NO: 20866 - protein, 415 aa, unidentified
VLEITNYVFVLDANGKQLAPTKEQKAWFLIRKKRATLVSKYPMVIQLKKEIPDEQIYKDEICCGIDDGGLHVGISLVQKCKTKNKVVFKGTIEQRKDVKHLMEVRKGYRRYHRFHKRYRQARFNNRKSSKRKERIAPSILQKRQATIRVINQLNKWINITNYWLEDVAIDIRALTDDYKAYRWQYQQSNRLDENIRKAVILRDGCKCMECGKSNCKLEVHHIKPRRSNGSNTLGNLISLCKKCHQKTEGQEELYMNRYFSMFNSSDNKNLNYAQHVMIGKKWLREQLSKLGTLTLTTGGDTANKRIDWNIEKSHSNDAICITGLQPDTCNIKEWTIKPMRRQSKAKADNVLGINHRDLVEYTFRNGETHRGYVTALYPGQNAINFQSSTKHCKKVNAKKCKLIWKYSKIYWLANV

SEQ ID NO: 20867 - protein, 446 aa, Pseudomonas sp.; identical to SEQ ID NO: 12968

SEQ ID NO: 20868 - protein, 393 aa, unidentified; identical to SEQ ID NO: 9754

SEQ ID NO: 20869 - protein, 557 aa, Blautia sp.; identical to SEQ ID NO: 7395

SEQ ID NO: 20870 - protein, 431 aa, unidentified; identical to SEQ ID NO: 15634

SEQ ID NO: 20871 - protein, 518 aa, unidentified; identical to SEQ ID NO: 18029

SEQ ID NO: 20872 - protein, 304 aa, unidentified
VLEVNKFAFMQLDNPNIQKWQYQQGPLYQKGSLENAVSEMQEHHCLFCEKPIEHYHHVVPKSENGSNTIANIVGLCTEHHNLVHKDATWQKKLAKEKVGLVKKYSALSVLNQIIPALTKEMNSLFPKHFFVTNGKSTYDYRTAHGVSKDHWLDAYCIACSVLPNDVCDSNINSHVPYELKQFRRHDRRVLHKANMSRVYTLNGKTVATNRHKAIKQTTDSLEEFRQSHPGDVCKLKVKEHHPAYRNLNRNYPGSVFLVDGQVHVMQGVSGSHNGKADGYYNTNGNAYPYYKCKFVVKNEGIVFA

SEQ ID NO: 20873 - protein, 408 aa, unidentified; identical to SEQ ID NO: 11651

SEQ ID NO: 20874 - protein, 424 aa, Enterococcus sp.; identical to SEQ ID NO: 4034

SEQ ID NO: 20875 - protein, 406 aa, Geobacillus sp.
MPCSPRKARLLLKQKKAKVVRRTPFTIQLLYGSSGYKQPVSLGVDMGTRHVGISATTKKDVLFEAEAQLRTDIVELLAIRRQFRRSRRNRKTRYREARFLNRRKPEGWLPPSIQHKINSHIKLIDLVHNILPVTSVTIEVAAFDTQKLKNLNIRGVEYQQGEQMGFWNVREYVLYRDNHTCQYCKGKKKDPVLQVHHIESRKTGGDSPDNLVTLCKTCHHEIHEKGLEHIFQRKRPPMRDASQMTAMRWAMFSRIREKYSHANITYGYITKCIRIANGLSKSHMVDARCISGNPLAKPSGTVYLLKFVRKNNRQLHKATILKGGKRKSNKAPRFVKGFQLFDKVVYERKECFIFGRRSSGYFDLRLLDGTKVHASASWKKLKRVEHASTLLIERRKGDSSPTFALA

SEQ ID NO: 20876 - protein, 417 aa, unidentified
MPCSPAKARLLLKEKKAIVKRRTPFTIQLTIATGEAKQPVALGVDSGYKHIGLSATTEKAELYASEVELRQDITDLLSARLALRRSRRSRKTRYRAPRFNNRVANKREGWLAPSVENRIAAHMSRVEAVMRVLPVTAITVETAAFDTQLLKNPDIAGEAYQQGEQLGFWNVREYVLFRDGHVCQHCRGKSKDPILNVHHIESRRTGGDAPNNLITLCETCHKAFHRGEIELKVRRGKSFKAATFMGIMRWTLFERLKKAHPELRVRNTYGYLTKHKRISHGIAKSHCADAYCIADNLGAKRLEGFFFQKQTRKHNRQIHKLSILKGGLRKKNQAPYEVKGFRLFDKVICKGEEAFIFGRRTSGSFDVRRLDGTRISAGINYKKLRLLEPRTTYLPEFRMEAALPPLHECRGLRAESL

SEQ ID NO: 20877 - protein, 405 aa, unidentified
MSVAVMSKTSMRLMPTSEYRARKLLKSKKATVYGYHPFTIQLTERETGDVQPVELCMDTGYLHIGMSVKSKKHEYLGVQIDTLTDEKQKHDACRMYRRQRRSRKRYRQSRFNNRKRSDGWIAPSLEHKKDIHIQTISRICNAIPITNITLEMGNFDTQVLKALKKNRPLPQGTDYQHGERYGIATLREAVFARDKYTCQCCRRTIADGAILHVHHIIYRSRGGTNRMSNLATVCDRCHTPANHKPGGKLYNWKPKLASFKGATFMTAVRWKMYNEVKSKFSDINIHITYGAETKEQRRAFDITKSHVNDAFVMGQFHPKHRSRPVCYKKKRRNNRCLEKFYDAKYIDSRDGKKRSSQELFNGRINRNHKKDSENLHQYRQQKVSSGRRTIRKQHYSIQPHDIVVF

SEQ ID NO: 20878 - protein, 424 aa, unidentified
MYVFVLNDNGKPLMPTHAAKARKLLRAKKARIVSRNPFTIQLNYHATEYVQPVTVKLDTGFKRGGVALQSNGKILFQGEIVHRRYINQPTRGQVLVVRRERRRARRYRLRYRAPRFDNRRRPEGWLPPTVKAKADVQVNVLKVLAKYAPVTRAIIEVGSFDTHKMQNPDIKPEDYQNGRQKGFKNVKEYVKHRDNRCINCGAEIKEVHHLKQKAKGGTDNPSNLAALCKKCHRLVTLGRLKLDITPGRELKGAAFINAAKDYIVSEVKKFISEVVTQEGWRTKEERERLDLPKSHVNDAIAMDTSGENIYIPNIPVYEIRPRQRAVRQQYLSEPQKGGIFKRYRHPWQNIAGIKRGDLCRDAKTGQLVVVDTLLATGKLNARVLKTGRRLVNIAPVRLQILERARGLMFNPGTQERRLNAALLP

SEQ ID NO: 20879 - protein, 515 aa, unidentified; identical to SEQ ID NO: 3725

SEQ ID NO: 20880 - protein, 419 aa, unidentified
MLVYVLKQNGQPFMPTERFGKVRRLLKEGKAKVVRREPFTIKLLYEPETDVVQECYCGVDTGSKHVGVAVVGNDKVLYQSQTELRNNIKKKMDRRRGFRRNRRYRKTRYRKCRFSNRRNSIKKDKLPPSVKHKVQAHIDEIEFCKKILPVSDLILEVSQFDTALMKNPSLINEKVRHWGYQQGFNYGYSSRRSAILHRDNYTCQCCGKKNCRLEVHHIKFKSNDGTDDEENLITLCEDCHKGIHAGTVVLNKKPKKSKNLKYATHMSIIRSWLLKRYPDAIETFGFVTAENRNHLKLKKDNYIDACVIASGGLRFEELDVIFYKRRVSKGDYKLVRGIRGEQKLPTRKIYGFRKFDKIEYFGEKYFIRSRTSKGFATLMDIFGNEVDFSSMPRGKKMPKLSNCKRVLARRSCLCVNQKK

SEQ ID NO: 20881 - protein, 427 aa, Enterococcus sp.; identical to SEQ ID NO: 5630

SEQ ID NO: 20882 - protein, 424 aa, unidentified
MRVFVFNMRGRPLMPCSQRKARLLLRENKAMIYKYHPFTIQLTYTTGETKQDCHIGIDTGSKYIGAAVRSEDKVFWKGEIELRQDIRSNLDTKRIYRRSRRNRKTRYRKTRFLNRKRRDEWLPPSLQSRINHTFHWIDTLSSLVPNPILHIEVGKFDVAKMINPEIHGVDYQHGQTYGFFDERYFVFARDNYTCQCCGKSKNKILNTHHIIYRSNGGTNRVDNLITVCTDCHTLQNHRKGGIFYQWQEQHKKVKQYKEPPFMNTLRKRIFVAYPDAEITYGSETTPKRKAMKLDKTHYNDAIVISGINEIKENPEEWLLIKQFRKKKRSLHEATARKGRKKPNRNQTRNSKNTPYYKGFYLNDKVSVFGKSGYITGFTSNAAYIKDENNDYITLPNKTYKQVSINKMKLECHNNNWQYIIKNAV

SEQ ID NO: 20883 - protein, 424 aa, unidentified
VPVMVYVIGQNGQPLMPTNRHGKVKHLLKSGKAKVVRRCPFTIKLLYRSTNYAQDLTLGVDTGSGTIGTAVTKDNDDVVYMSKVIVRNDITDKMTQRAKYRRNRRNRKTRYRKPRFLNRRNSIKNDRFSPTMVSKIQSHQREIEFIKSILPITTIVLETGQFDMHLMKNPMLANEKVRHWGYQKGTNYGFENTKAMVLNRDGYKCQCCKGKHKDSKLEVHHIVFRSQGGSNEADNLITLCHTCHKALHDGKISPNFKGKNKGLLKYATQMNSIRKQLLRTYPNAVETFGMVTKANRLNLGIEKDHHLDACVIASGGNPFTFTTNEVFIKRNVSKGDYQKTKGVRSEQPIMTSKIQGFRKFDKVKYFGKEYFIKGRMSSGYAILMDIEGNKIGFSSMPKGMKTPKLCNCIRVTARNSVLVDKVAV

SEQ ID NO: 20884 - protein, 408 aa, unidentified; identical to SEQ ID NO: 5560

SEQ ID NO: 20885 - protein, 422 aa, unidentified
MESSIIYVQNTKGEPLMPTRRHNKVWYWLRKGLARVVSREPFTIRLRFETTGYTQKAVVGVDTGSQTVGIAAITNREVVLQAEVHLRTDIKEKLHQRRQYRRNRRSRKTRYRSARFANRRRPDGWLPPSLQSKAEATMKAIRWVMRLLPVQQCNVEVASFDTQKMQNSDIAGMTYQQGELSGYLVREYVLTKWKRQCSYCHTTGVPLQLEHIVPKARGGSDRVSNLCLACQNCNMAKGTQTAAEFGHPQVQAQAKIPLKDAAHVSSIKTRVIHDLQAIFAERQVRITYGYETKYKRTQGLGLPKSHTNDAVAIACEIGEMVKPLETVHHLRCLARGKYQRFNGPHSEHKCWAPHKVHGFKLYERVKAKGVVGYIAGRREKGAFVIKDCISDKRMLDVTPRKLERIARPVQGFLITRQAADVE

SEQ ID NO: 20886 - protein, 417 aa, unidentified; identical to SEQ ID NO: 5046

SEQ ID NO: 20887 - protein, 414 aa, unidentified; identical to SEQ ID NO: 14060

SEQ ID NO: 20888 - protein, 426 aa, Oscillochloris sp.
MSFVFVLSSDGQPLDPCHPARARQLLDHGKAAVWRRYPFTIRLKERRAAASVTHPHRVKLDPGSKTTGIAVVAETTGRVVWAGELTHRGQAIRDALLSRRAIRRSRRQRKTRYRQPRFLNRRRPEGWLAPSLAHRVDTTRTWVNRLRRFVPVTAISMELVRFDTQLLEHAEISGVEYQQGTLAGYEVRQYLLEKWGRRCAYCGTTGVPLQVEHITPRARGGSDRISNLALACEPCNTRKGTQTAEAFGHPEIQAQARRPLKDAAAVNQTRWALYGRLIATGLPVEVGTGGRTTFNRTRLGLPKAHWHDAACVGASTPEVLDTRGVRPLFIRAMGHGTRQMCRMNAFGFPRTGPKGARVVKGFKTGDMVRATVTTGTKQGMYVGRVAVRTSRSFNITTAAGTIQGLHHRFFRAVQRADGYSYTYEVA

SEQ ID NO: 20889 - protein, 425 aa, Moorena sp.
MSTNYVLVLDTNRKPLNPCKPGMARSLLKAGKAAVFKRYPFTIILNKAVDDAPKPVQLKIDPGSKVTGLALVQDDKVIWGTELYHRGQQIKADLEDRRKLRRGRRNRKTRYRQPRFLNRTRPEGWLAPSMLHRVLTTMTWVRRLTKFVPVTGISLERVRFDTQKMINPEVSGVDYQQGELQGYEVREYLLEKWNRQCAYCQATDTRLEVDHIHPKSKGGSDRVSNLTLACHDCNQAKGNQDIRDFLCGKSDLLNRILSQVKQPLLDAAAVNSTRNKIAEELIATGLPIEFGTGGQTKYNRCRLDLPKTHWLDAACVGVVVHLTLETKQCLTITASGHGNRQMAGVDKYGFPYRHRTRQQVHFGFRSGDIVRAVVPKGKKAGTHVGRVLCRKSGSFDIQTKSGRVTGINHKYCSTIHGRDGYAYVF

SEQ ID NO: 20890 - protein, 447 aa, unidentified; identical to SEQ ID NO: 4640

SEQ ID NO: 20891 - protein, 536 aa, Nocardiopsis sp.; identical to SEQ ID NO: 16320

SEQ ID NO: 20892 - protein, 482 aa, unidentified
LVWNVQAPWDVYPSPTLCGLCLKVLRGRNGDADKKPIPTLTKDENRPSGRTTGLRAEQAEPAGIRKGDTLKVFVLNMRSKPLMPCSPAKARHMLKAGKAVVVRRTPFTIKLTIATGETKQDVTLGVDAGARHVGISATTEKEEVFASEVALRQDITGLLADRLAFRRARRNRKTRYRAPRFNNRVRSKHKGWLAPSVENRIQAHISRIEAVCRLLPVTKIVIETASFDIQKIRNPEVEGTGYQQGDQLGFWNVREYVLFRDGHVCQHCHGRSRDKILNVHHLESRKTGGDAPNNLITLCETCHKAYHAGKIKLKVKRGQSFRAEAFMGIMRWTLLDRVRKTHPKLPVENTYGYLTKHKRIALGLPKTHCADAFCIAGNLKALRRGDFLFQQQTRKHNRQIHRCSILKGGVRKLNQAPFLVKGFRLFDKVRIGGQIGFVFGRRVRGIFNIRRLDKTVIGTDINCKKLSLLETRKTFLTELRKE

SEQ ID NO: 20893 - protein, 396 aa, unidentified
VVRRTPFTIQLTIATGESKQPVSLGVDAGYKHVGLSASTEKAELYASEVELRKDITDLLSARRALRQSRRNRKTRYRAPRFDNRIRTKRKGWLAPSVENRINAHLSRIEAVLRLLPITKITVETASFDMQRLKNPDISGKEYQEGEQLGFWNVREYVLFRDGHVCRHCHGRSKDPVLNVHHLESRRTGSDSPDNLITLCETCHKALHRGEITLKAKRGQSFRAQAFMGIMRREVLNRLKASYPELKVHETYGYLTKHARIANGIVKSHGADAFCIAGNLGAERLGEFFFQKQTRRNNRQIHKLSILKGGIRKRNQAPFEAKGFRLFDKVACQGEEGFIFGRRSSGSFDVRKLDGTRISAGISCKKLRLLEKRRTYLTEIRKGEALPPLPEGRGLRA

SEQ ID NO: 20894 - protein, 555 aa, unidentified; identical to SEQ ID NO: 8017

SEQ ID NO: 20895 - protein, 413 aa, unidentified; identical to SEQ ID NO: 3587

SEQ ID NO: 20896 - protein, 515 aa, unidentified; identical to SEQ ID NO: 5111

SEQ ID NO: 20897 - protein, 388 aa, Scytonema sp.; identical to SEQ ID NO: 2683

SEQ ID NO: 20898 - protein, 441 aa, unidentified
MSVSVFVQDRKHRPLMPCRPARARRLLKSGRARVVRLFPFTIRLTDRLIEDSKLQPVLVKIDPGSRRSGFAVVRVDEKGQHHALFFIELVHRGEYIRDALTGRSAHRRWRRGNLRHRAPRFLNRTKPQGWLPPSLRHRVDTATAWVAKLMKLAPVTEIVEELVKFDTQKLQNPEISGIEYQQGTLFEYEVREYLLEKFGRKCVYCGAENVPLNIEHVVPKARGGSNRISNLVLSCVDCNQKKDAQPVEVFLKNRPEVLDRIKRQIKKPLRDAAAVNATRWSLFNALKAFGLPVETGSGALTKFNRHTFGVPKEHWLDALCAGRVNGVHYPKGMGILQVRCTGRGSYQRTRVDKYGFPRGYLTRQKRVHGFATGDMVEAVIPSGKKAGTYRGRVAVRARGCFVIQTPEGKVDGIGWRHCRLLSFNDGYGYAWLRPAPYSSPV

SEQ ID NO: 20899 - protein, 442 aa, unidentified; identical to SEQ ID NO: 4522

SEQ ID NO: 20900 - protein, 487 aa, unidentified
MHNIGEVDHRTQVLPYSFITIVRKECSVMSNSICVISKNGERLMPTFRPGRVRHLLKDGKAKIVKHQPFTIQLLYDSNNYTQPIEICEDVGYNYIGISVKSTTHEYVSAQYDTLQDEKEHHDSCSKYRRTRRNKLRYRKARFNNRKRKEGWLAPSLEHKKQLNINLIEWYMSVIPITHTTVEVGSFDTMLLQAIQKGEAKPEGTDYQQGPRYNLATLREAVFYRDNYTCAVCGRSSMKDGAILHMHHMLYWKGRHGYQLDELVTVCEKCHTSPNHQKSGVLFGFGENKKFANLSGAAFMNAVRWQIVNALYATYGKDFVTVTYGAMTKERRILLGIEKTHNNDAYAMGDYHPAHRCEFKHYQKRRRNNRVLEKFYDATYIDARTGNKAKGKELFNGRINRNHKKDSENLHKYRARKTAKGRRSIRNKRYTIQSGDTILYAGKKHITSGCFNKGSWLRISVNGTVKSIAISKVKLINHIGAWKEDTSI

SEQ ID NO: 20901 - protein, 406 aa, unidentified
MVYVQDINGKPMMPTTRHGKVRRLLKDKKAVVVNLCPFTIKLMYVTSDYKQEIVLGVDAGTKHVGLSATTKSKELYSSEVILRNDIVDLLSTRRELRRTRRNRLRYRKPRFDNRIKSRRPGWVAPSVKYKVDAHIRVVENVCSILPISRIVIEVAQFDTQKIKNPEISGKEYQEGDQLEFWNTREYVLARDGHKCQYCKGKSKDSILNVHHIESRKTGGDSPSNLITLCETCHKEYHKGNIDLKIRRGKSLRDAAVMGIMKWRLYEELKSRYDRVFMTFGYITKHNRIKYGIEKSHTSDAFVISKNINAKRIERQYLKRLIRRHNRQIHKMKILKGGKKKNNQAPFEVFGFRLFDKVLYNNKIFFVYGRRKSGSFNIRDFNGENSKDVSRKKFKLIRGKRHPIILK

SEQ ID NO: 20902 - protein, 515 aa, unidentified; identical to SEQ ID NO: 5111

SEQ ID NO: 20903 - protein, 431 aa, Escherichia sp.; identical to SEQ ID NO: 3801

SEQ ID NO: 20904 - protein, 407 aa, unidentified
MPNKVYVINKHGRPLMPCSPAKARHLLDAGKAKVKKRTPFTIQLVYGSSGYTQEVILGVDAGSKTIGMSASTTKEELLSAEVKPRNDVVDLLSTRREFRRARRNRKTRYRKPRFDNRVRSKHKGWLAPSVEVKIQEHITSIKRVCRILPVSKVVVETAEFDLQLLKAIADGKPVPQGEDYQKGEMYGHYNVRQYVLWRDGYTCQCCGAHATKKKEVRLHVHHLESRKVGGDAPDNQVTLCESCHEKLHKGLIAEKDFKKRKRRSTRDATFMGIMRKTLMQRLCSELPIPVIETRGYITKATREKLLVLPKSHTNDALAIAQGKQGFNVGYLPGIVQINKIYTIRPVRHHNRQLHKAAILKGGIRKSNQAGKYVFGYCLFDKVQFNGQDCFIWGRTTGIFTIKTINGK

SEQ ID NO: 20905 - protein, 428 aa, unidentified
LKVFVLNMRGQPLMPCSPAKARHLLKAGKAVVKRRTPFTIQLRIATGETKQNVTLGVDAGAKHVGLSATTEKEEVFASEVELRQDITGLLAARLLLRRERRQRKTRYRAPRFLNRVRSKHKGWLAPSVENRIQAHMSRIDAICGLLPVTKIVIETASFDIQKIKHPDVEGTDYQQGDQLGFWNVREYVLFRDGHVCQHCHGRSKDKILNVHHLESRQTGGDAPNNLITLCETCHKAYHAGKIKLKVKRGQSFRAEAFMGIMRWTLLDRVRKAHPGLPVENTYGYLTKHTRITHGLPKTHCVDAYCIAGNLKAVRRGVYLHQRQMRKHNRQIHKFTVLSKRLEDGTKIGYRKLNQSPYLVHGFRLFDKVRCLGQIGFIFGRRSSGYFDVRRLDGVKLSPSISWRKLTLLEKRSTYLTELRKQDGASSPV

SEQ ID NO: 20906 - protein, 342 aa, unidentified
  REGION 1..342: note = IscB polypeptide
VSLGVDSGYNHIGFSAITKTKEITSGEISLDDKTSKRLTERRMYRRNRRNRLRYRKPRFNNRKTPEGWLPPSVQRKLDTHINMVNKLKELTPVKKVTVEIGEFDIQKLMNPDIYGKEYQQGDLYGYNNLKAFLFSREHGRCQFCGKNIVKGEKAHTHHIKPRSETGTDSPSNMALLHEDCHDELHKRGLYRKLKAPKEYKAEIFMSIIAARLKKALNCGVTYGYETATKRNLLGIEKSHVNDAFIIAGGINQERCLPYKVEQKRINNRTLQTNRKGFVPSIRTQRYVIQNRDFIWISDKKYLCGGVANRGIMIYYFDDTKKKLIYYKKVNKFYSTGSLTWIN

SEQ ID NO: 20907 - protein, 391 aa, unidentified; identical to SEQ ID NO: 12541

SEQ ID NO: 20908 - protein, 447 aa, unidentified; identical to SEQ ID NO: 8397

SEQ ID NO: 20909 - protein, 422 aa, unidentified; identical to SEQ ID NO: 5333

SEQ ID NO: 20910 - protein, 427 aa, Enterococcus sp.; identical to SEQ ID NO: 3871

SEQ ID NO: 20911 - protein, 424 aa, unidentified; identical to SEQ ID NO: 5075

SEQ ID NO: 20912 - protein, 306 aa, unidentified
MVGAFCGGQNPRAYPAIRRVCGILPVSKVVVETAEFDLQLLKAIADGKPVPQGEDYQKGEMYGHYNVRQYVLWRDDYTCQCCGAHATKKKEVRLHVHHLESRKVGGDAPDNQVTLCESCHEKLHKGLIAEKDFKKRKRRSTRDATFMGIMRKTLMQRLCSELPIPVIETRGYITKATREKLLVLPKSHTNDALAIAQGKQGFNVGYLPGIVQINKIYTIRPVRHHNRQLHKATILKGGIRKSNQVGKYVFGYCLFDKVQFNGQDCFIWGRTTGIFTIKTINGKMIKDGISFKKLKPVEKSTSYLIA

SEQ ID NO: 20913 - protein, 447 aa, unidentified; identical to SEQ ID NO: 5316

SEQ ID NO: 20914 - protein, 443 aa, Anoxybacillus sp.
MVEENMTCFMQRKGENPMVFVLDTNKRPLAPCHEAVARKLLKQGKAAIYRRFPFTIILKKSVDESEIKATYRLKIDYGSRHTGLAILRGQEVVWLGQLDHRTDIKERLDKRRAFRRARRKRKTRYRKPRFLNRRRKDGWLPPSLESRVQNIQTWVERLRKICPIEHISYENAKFDTQLMRNPEINGVEYQQGTLQGYEVREYLLEKFGRKCCYCGKEGVPLEIEHIIPKSRGGTDRVDNLCLACHDCNQRKGSKTAEEFGYPHIQEMVKKTLKDASVVNATRWKVYEVLKQSGCEVECGTGARTKMNRIRLDLPKTHYFDACCVGESTTNHLYFKTKEVLFIKAKGRGSHSRTNLDRYGFPRGYLARQKFFFGFQTGDMVKAVVPRGKYQGVWFGEVACRKTGSFDIKGKDGKRIAQGINYRYVQVIQRFDGYAYGKGVAELA

SEQ ID NO: 20915 - protein, 406 aa, unidentified; identical to SEQ ID NO: 3980

SEQ ID NO: 20916 - protein, 398 aa, unidentified
ELCMDTGYIHIGISVKSEKHEYLAEQIDTLTDEKTKHGACRMYRTLRRGRKRYRQPRFNNRKRDKDWIAPSLEHKKDIHVQAISRINKVMPLTDITMEMGNFDTQVLKAKEEGKPLPQGADYQHGERYGIATLREAVFSRDGYKCQCCGRTISDGAILHVHHIKYRSQGGTNSMTNLATVCDKCHTPKNHKPGGKLYNWKPKLPDFKGATFMTTIRWQLYNEVKSLFPDINVHITYGAATKEQRRELNIDKSHVNDAFAMGKFHPKHRTNAALYKKKRRNNRCLEKFYDAKYIDSRDGSKRTGQELFNGRINRNHKKDSENLHRYRLQKITAGKRTVRKRHYNIQPHDIVMYENRKRETSGCQSNGTRVILLSDKKSVAVKKVKIYKYAGGYFKSAFN

SEQ ID NO: 20917 - protein, 426 aa, unidentified; identical to SEQ ID NO: 6377

SEQ ID NO: 20918 - protein, 412 aa, unidentified; identical to SEQ ID NO: 5514

SEQ ID NO: 20919 - protein, 524 aa, unidentified; identical to SEQ ID NO: 13289

SEQ ID NO: 20920 - protein, 455 aa, unidentified
MQQFKKKLKNTPKDTPQVLCSVNSQLNKEEILSVESGLKNDKLFLNNPEVDQSESNRKQNMSVSVYVLNMRGNPLMPCSPRKAKVLLKQGKAVVVKRSPFTIQLTTATGETKQEVILGVDTGYSNIGISALTEKKELLSATFKLRTNISDLLKERAMYRRNRRNKLWYREPRWKNRANAKKEGRLMPSVLHKVNTHISIIEKIKKLLPISKVVLETGLFDMQKMKNDNIKKYQYQKGEMFGFENVKSYILSRDNHKCYFKCKDSYKLEVHHIKFRSQGGTDNPNNLITLCEKCHKKVHAGKLELNVKKHKELKSSTVMNIIRKRLLEFYTEAKETFGYETKVKRREINLEKSHSNDAFVIANGTNQIRSREFEVIQKRKNNRCLQLNRKGYKPSIKKERSKIQPLDLFWVRGKNYICKGMFSYGKYICYGSTKLKEYFKTKDVEKYYNQSGLVWN

SEQ ID NO: 20921 - protein, 427 aa, unidentified; identical to SEQ ID NO: 5712

SEQ ID NO: 20922 - protein, 414 aa, unidentified
MVYVINKQGQALMPTERFGKVRRLLKNSLAHVVCRIPFTIQLDYDTTDYTQPVSLGVDAGSKHIGISATTSEKELYAADVELRNDIVDKLSTRREQRRTRRSRLRYRKARFNNRVSSKRKGWLAPSVENKIQTHLTVVEKIHKFLPITNIVVEIASFDIQKINNPIISGSEYQQGEQLDFFNVREYVLFRDNHICQHCKGKSKDKVLNVHHIESRKAGGDSPNNLITLCETCHKAYHRGEFELNVKRGKSFRDVAFMGIMRWSFYDRLKNIYPNVSMTFGYITKNTRITNNLPKDHYVDARCISGNPTAKPLGYYFYQKKVRCQNRQIHKANFLKGGRKKLNQAPFLVKGFRLFDLVEYQKELYYIFGRRSSGSFDIRKLDGTKVNKGSINCKYLRLIATRKSILTEKRMQVNL

SEQ ID NO: 20923 - protein, 466 aa, unidentified
MSTCACVLGKSGERLMPTIRLGKVRHLLKDGKAKIIKHHPFTIQLLYDSETNIQPIEICEDVGYNYIGISVKSESHEYVSVQYDTLQDEKDCHDSCRKMRRIRRNRLRYRKPRFDNRKRNKDWLAPSLEHKKELNVNVIKMYCEVVPITHVTVEVGSFDTMLVKAIQEGKAIPEGADYQKGPRYNLATLREAVFYRDNYTCKVCGRKAKNDSAILHVHHMFYWKGRHGNSLNELLTVCEKCHTPANHQKGSKLYGFGENIKFANLSGAAFMNTVRWQIVNELYATFGKLFVTFTYGAMTKEKRIALHLEKCHNNDAYAMGNFHPVDRCAFEHYKKVKRNNRILEKFHDSQYIDIRTGKVANGRSLFNGRINRSHKKDSENLHKYRGKRTRKGYRALRRKKVALNPGDLVSLNGEILVVHSTHAGKNGYVGVEFKTPSKSGKKSASLKKLKIVKTSNSMHSAWTKVS

SEQ ID NO: 20924 - protein, 316 aa, Succinimonas sp.; identical to SEQ ID NO: 10313

SEQ ID NO: 20925 - protein, 457 aa, unidentified
MDAVAVISASGKPLMPTNPVRARKLIKKGKAVIYKYRPLFTIRLTERTDGDIQTIEYCCDTGYQHIGLSIKSRKHEYVNERRDLLPNETERHNDSRKYRKARRRRKLRHRACRRDNRHDNQICKDGYAPSIRNKRDQHISLYRSYTEILPVERAVFEMGQFDTQVLKAIEKGEPLPQGKDYQHGERYGYATLREAVFARDDYTCICCGKNAFKDKRILCVHHLGFRIGDRTNRLANLATVCTKCHTPKNHQPKGKLYNLKPELKDFKGATFMTMVRWDMLDKLKVVSKDIQVDVTYGAATKEARRDLKIKKSHANDAYCMGSFHPSHRTDLKRYEKCRRNNRVLSKFYDATYIDIRDGKKKKANALGCNRTKRRESRRSEKNERIYRGEKVSKGRIVLRTKRVVIRPGDIVYVGKKKYIVASSKNLGKQLKLADGSLLTTSKVTKIIHCGGWKTVTL

SEQ ID NO: 20926 - protein, 458 aa, unidentified; identical to SEQ ID NO: 4149

SEQ ID NO: 20927 - protein, 387 aa, Sutterella sp.
  VARIANT 320..331: note = X can be any naturally occurring amino acid
  source 1..387: note = isolate UBA1442
MVFVLDRHHKPLMPCHPARARRLLGKGRARIHKLYPFTIRLVDRELKDSTVQPVVLKLDPGSKETGMALVREDETKTHHALYFVNLKHRGSEIKQSLLQRSSFRRSRRSRNLHYRAPRFLNRTRPQGWLAPSLQHRVDTTLSWVERLRKLAPVATLEMELVKFDTQKMQNPEIDGVAYQQGELAGFEVREYLLEKFGRKCIYCGAEGVPLNIDHIVPKSAGGSNRVSNLVLACVDCNQKKNNLPFEVFLKGDKAKINRIRSQLKTPLKDAASVNTTRWQLFEALKLTGQPLTTATGARTKYNRHQFGVPKEHWLDALCVXXXXXXXXXXXXSDFSASELVTWLLQRCLPAKKRALTKEELQSARAAVLPFKLQAGKLMASATGTAVF

SEQ ID NO: 20928 - protein, 419 aa, unidentified; identical to SEQ ID NO: 4209

SEQ ID NO: 20929 - protein, 420 aa, unidentified
MQYVYVLNKHGEPLMPCSPGKARLLLKQQKAHVVKRTPFTIKLLHGSAGYKQPITLGVDAGSKHVGLSASTEKRELYSEEFTPRNDVVELLSTRRQNRRSRRNRKARYRAPRFDNRVHSKHKGWLAPSVEVKIQEHITVIKRICRILPITLVRVETAEFDTQRLKAMLAGKPLPVGTDYQLGEMYDEYNVRQYVLKRDNYTCQCCGAHTTAKKAVKLHVHHLESRKVGGNAPSNLITLCVTCHNNLHKGKITLDGKKRGKTLRDAAFMGIMRNTLLTRLRNELNIPVQNTYGYITKLLREQNDIKKSHVNDARCISKHPLAEPCSVCYRTKAIRHHNRQIHKAKILKGGIRKANQAPYIVKGFHLWDKVLYNGQECFISGRRSSGYFALRKLDGTAITNSISFRKLRLLEPATNYLIERM

SEQ ID NO: 20930 - protein, 406 aa, unidentified; identical to SEQ ID NO: 3415

SEQ ID NO: 20931 - protein, 461 aa, unidentified
  REGION 1..461: note = IscB polypeptide
MQKLETRNTYTPLDASQVQGNCDSVVKHGQNVQVLQSLKTVSTNSDVNQQSGKTGQDLRVPVLNMRGKPLMPVTPAKARHLLEQDKAKVVSRKPFTIQLRYATGETKQDIILGIDSGYKHVGVSAVSNKKELFSAEIILRTDIPKKLQEKKMYRRNRRNHLWHRPPRFNNRSKPEGWLAPSIQHKLDSHLRIIEKIRTLLPVTEIIVEVAAFDIQKIKNPDINGERYQQGKQLGFWNIREYVLHRDNHTCQHCYGKKKDKILQVHHINGKAEGATNRPEELLTVCKTCHDEHHAGIDIIPKKKIKNFKSETFMTTVRWKLINAIGCGHTYGYITKHNRIKQGLPKSHVNDAFVITGGTTQERCKAMFSKQVRRNNRKLQINRKGFKPAIRRQRYKLQPNDLVRYNKQEYHVKGVHCKGSKVVLDIKKSVTIRKVELICYGKGLFAPIHLTSNEMDILGGIL

SEQ ID NO: 20932 - protein, 477 aa, unidentified
MIIALDKYKRPLGFLTERRCRILMERKRAVLYRVFPTVVILMDVDARTIPDLPSFRIKIDPGSKYTGIAIIRNDTDEFVYAMQIEHRGDAVRAALNKRKNARRNRRSRETGYRRAKWGNRCLSEKDKRSYDSSREDDWLPPSIRSAADNVISWVRRLGRWINLTECSFEAVRFDTQLMEDPDIEGEEYQHGTLFGLEIKEYLMEKFGHTCQYCGGKSGDPVLEWEHMRPKSRGGSDRVKNALLSCSSCNKDKGNRTPEEWLELIKARLPREKEKRKELDEERVELIQKVIDGKPQGGALRYAAWVSSSRRYLEKALFGIFGNVECSSGGRTKYNRTELGYPKEHHYDALCVGTVPEKGYHDRTNGYYLYAKAAGRGTRLRGHLNKCGVIVAKWTDRKKGFFGFQTGDIVVAEVPHKTPKPYKYEGRFVGRVMVRATGSFDIKTTDGKLVTVKEQYCRLLQANSGYQYTMKRAIPLGH

SEQ ID NO: 20933 - protein, 395 aa, unidentified
VGYNYIGISVKSESHEYVSAQYDTLQDEKEHHDDCRKYRRTRRNRLRYRKPRFDNRKRSEGWLAPSLEHKKQLNIRLIERYVSVIPITRATVEVGSFDTMLLQAIQKGESKPEGVDYQKGPRYNLATLREAVFYRDNYTCQVCGRKVADGAILHMHHMFYWKGRHGYQLDELVTACEKCHTPANHQKGGKLYGFGKDKKFANLSGAAFMNAVRWQIVDALHATYGKEFVTITYGAMTKEKRIALQLEKTHNNDAYAMGDYHPACRCKFRHYQKRRRNNRVLEKFYDATYIDARTGNKAKGKELFNGRISRNHKKDSENLHKYRSKKVSKGRRSIRRQRYAIQPYDTVRLENKTYITSGCHNKGTRLLIPANGKSKSVAISKVQVVCHAGAWIQII

SEQ ID NO: 20934 - protein, 405 aa, unidentified
  source 1..405: note = Methanosarcinales archaeon UBA203
MPASPAKARHLLENGQAVVVRRTPFTIQLLYGSSGYKQDITLGVDAGYATVGYSAVTDGRELIAGEVNLRNNIKRLLEKRKAYRRTRRSRKWYRKPRFDNRGRRDGWLAPSIQHKLDSHIKLIEKLKSILPITQTIVEVASFDTQKMQNPEISGVEYQQGELQGYEVREYLLEKWGRKCAYCGKKDVPLEIEHIVPRSRGGSDRVSNLTIACHECNQTKGNQTAEEFGHPQIQAKAEKSLKATAFMNIVRSKMVDLLNCDQTYGYITKHDRIELGMPKSHANDAFVIAGGNGQEHAVHLHIGKQVRRQNRSLFKANFLKGGKLKRNTVKEVKGFRRFDKVKYDDKECFIHGLRSSGYFDLRTITGDRIGASVNSKKLTLLERAKGTIQEVCVIPPRPCGRGLLAR

SEQ ID NO: 20935 - protein, 487 aa, unidentified
MPDGRRKPERKHMVAVVTSTGKPLMPTSAYRARKLLKKGRAVIFKYRPYFTIQLVDRADGEVQEVEYKSDTGSVHVGISVCTEKKELLSEQRDLLENEPEHHNDRKKNRRTRRNRKRYRKPRFDNRKKKPQEGHEKWLPPTLLHKMEVQVRLFREFCRVVPVTSACFEMGKFDTQALKAVSKGEPVPEGEGYQKGERYGTDTLRAAVFLRDGHTCRFCGRSVKDGAILHVHHVGYWKGDRTDRLANLASACEQCHTPANHGKNGILYGKEPEFKTLKDASYMTSVRWIMLDEIKKVAPGVQVSVTYGVTTKRKRQELHLPKSHVNDAFSMASFHPKKRSDTEYWKKIPRHDRVLQRFYDAVYLDTRDGSEKKGSELSNGRISRNHKKDSENLHRYRGYKVSKGHNSIRRGASSLKPGSIVMYKGEKMTVHGTHTRYVTDKDGKTVKKVNVQFTRPASDGKKSASLKKCTPVSRVYNTGWKRYWPDKK

SEQ ID NO: 20936 - protein, 557 aa, Blautia sp.; identical to SEQ ID NO: 7395

SEQ ID NO: 20937 - protein, 490 aa, unidentified
MYVVYVLDRQGKPLMPTKRFGHVRRMLKTGKAKAISTKPFVIQLQYESTDFVQPLYGGTDPGRTNIGEAVLNNKGEVVYAAYVITRNKEIPKLMADRATHRRASRRGERLRRKRRAKANGTMTCFPEGRKLSGYKDGVLELKGIINTESRFNNRKRPAGWLTPTARQCIQTHLNMVQNICKILPVTDWTLEYNRFAFMQLEDGSVCGWDFQNGRLKGYASKEDYIYALQGGACVCCGASIEHYHHIKPRHKGGSNTPENLVGLCSVCHTELHTGKRNLDKIGKYKKYAGTSIVNIAIPFIWDGIVKMFGDKAHICEGQETAELRKANSIPKEHFADAVCIAGIGSGITPQYDDNQPFKLRQFRCHDRSSINAQVERTYLDGKTIVAKNRKPRFEQKGDALSDLQSKMTKEHGELAARRAVSKLVAKKSYRRYNASERIKPSAVFMFNNKKYLLRGQLTNGKYYRAFGEGTKNFPSRNCEVVSSGYSLTYA

SEQ ID NO: 20938 - protein, 386 aa, unidentified
TIQLTYTTGETKQDCHIGIDTGSKYIGAAVRSEDKVFWKGEIELRQDIRSNLDTKRIYRRSRRNRKTRYRKPRFLNRKRRDEWLPPSLQSRINHTFHWIDTLSSLVSNPILHIEVGKFDVAKMINPEIHGVDYQHGQTYGFFDERYFVFARDNYTCQCCGKSKNKILNTHHIIYRSNGGTNRVDNLITVCTDCHTSQNHRKGGIFYQWQEQHKKVKQYKEPPFMNTLRKRIFVAYPDAEITYGSETTPKRKAMKLDKTHYNDAIVISGINEIKENPEEWLLIKQFRKKKRSLHEATARKGRKKPNRNQTRNSKNTPYYKGFYLNDKVSVFGKSGYITGFTSNAAYIKDENNDYITLPNKTYKQVSINKMKLECHNNNWQYIIKNAV

SEQ ID NO: 20939 - protein, 512 aa, unidentified
MSTVYVLNKDGKPLMPTTRCGHVRHLLKEQKARVVTSKPFTIQLLYEADDLVQSLYLGIDPGRTNIGVAVVKADGTAVFTAHLETRNKEIPKLMKKRKESRRARRTNGRRCRRQRRAKANGTISKKCVKHDTAQNSSVSKRAKEIGVIKRHLPGCEKDVLCIGIKNKEAKFSNRTRPEGWLTPTANQLLQTHINLVKKIQKFLPISDVVLEINKFAFMRLDNPNVQKWQYQQGPLYQKANLEETVSEMQEHHCLFCKKKIDHYHHVVPQHKNGSNTIDNIVGLCTQHHDLVHKDATWQKRLAKKKTGLNKKYGALSVLNQIIPALTKELSSLFLKHFFVTNGKSTYDYRAAHGVSKDHWLDAYCIACSVLPNDTCDKTINSRVPYELKQFRRHDRRALNNENMSRVYTFNGKMVATNRHKATEQTTDSLEEFRQRQPNDICNLKVKEHHPTYRNMNRNYPGSVFLVGNQVHVMQGIAGSKDGEATTYKDTNANSIAAEKCKFVAKNSGILFV

SEQ ID NO: 20940 - protein, 443 aa, unidentified; identical to SEQ ID NO: 9979

SEQ ID NO: 20941 - protein, 425 aa, unidentified; identical to SEQ ID NO: 2429

SEQ ID NO: 20942 - protein, 417 aa, unidentified
MPCSPAKARLLLKEKKAIVKRRTPFTIQLTIATGEAKQPVTLGVDSGYKHIGLSATTEKVELYASQVELRQDITDLLSARLALRRSRRSRKTRYRAPRFDNRVASKREGWLAPSVENRIAAHMSRVEAVMQVLPVTAITVETAAFDTQLLKNPDITGAAYQQGEQLGFWNVREYVLFRDGHVCQHCRGKSKDPILNVHHIESRRTGGDAPNNLITLCETCHKAFHRGEIKLKVRRGKSFKAETFMGIMRRTLFERLKKAHPELNVRNTYGYLTKHKRISYGIAKSHCADAYCIADNLGATRLEGFFFQKQTRKHNRQIHKLLILKGGLKKKNQAPYEVKGFRLFDKVICKGEEAFIFGRRTSGSFDVRRLDGTRISAGINYKQLRLLEPRTTYLTEFRKEAALPPLHKCRGFCAEFL

SEQ ID NO: 20943 - protein, 351 aa, Aphanizomenon sp.
MSNYVLIVDTNKKPCNPVHPGTARQLLKLGQAAVWRKYPFTLILKAESQELTRPIQLKIDPGAKTTGIALVQGDKVVFGAEISHRGQSIKASLESRKGIRRGRRKRHTRYRQARFLNRTRAEGWLAPSLQHRVETTSTWVNKLIRFAPITGISQELVRFDLQQIDNPEILGIEYQQGELQGYEVREYLLEKWERKCSYCGVKDVPLQVEHIHPKAKGGSNKISNLCLACDSCNKKKGTLDIEKFLAKKPDVLKKIKLQSKCPLKDASAVNSTRWALFHRLKETGLPVVTGSGGKTKFNRTQLQLPKTHWIDAACVGDIDSLKVLITKPLLIKATGHGGLKTRGFQTTRFFT

SEQ ID NO: 20944 - protein, 431 aa, unidentified
MDAWDIIVILNKRGKPLMPCSPAKARLLLKEKKAIVVRRTPFTIQLTIATGEAKQPVSLGVDAGYKHVGLSASTEKAELYASEVELRQDVSDLLSARRALRQSRRSRNTRYRAPRFDNRIRTKRKGWLAPTVENRINVHLSRIETVLRLLPVTKITVETASFDTQLLKNPDIAGKEYQEGEQLGFWNVREYVLFRDGHVCQHCHGRSKDPVLNVHHLESRRTGGDSPGNLITLCETCHKALHRGEIKLKAKRGRSFRAETFMGIMRWGVLNRLKASHPKLEVHNTYGYRTKHARIANGIAKSHCADAFCIAGNFGAKRLGEFFFQKQTRRNNRQIHKLSILKGGIRKRNQAPFEVNGFRLFDKVACKGEEGFIFGRRSSGFFDVRKLDGTCISAGISYKKLHLLEKRRTYLTEIRKEEALPPPPEGRGLRA

SEQ ID NO: 20945 - protein, 279 aa, unidentified
VVVETAEFDLQLLKAIADGKPVPQGEDYQKGEMYGHYNVRQYVLWRDNYTCQCCGTHPSKKKEVRLHVHHLESRKVGGDAPDNQVTLCESCHEKLHKGLIAEKDFKKRKRKSTRDATFMGIMRKTLMQRLCSELPIPVIETRGYITKATREKLLVLPKSHTNDALAIAQGKQGFNVGYLPGIVQINKIYTIRPVRHHNRQLHKATILKGGIRKSNQTEKYVFGYRLFDKVQFNGQDCFIWGRRTTGIFTIKTINGKMIKDGISFKKLKLVEKSTSYLIA

SEQ ID NO: 20946 - protein, 354 aa, unidentified
IKHRGGAIRDALKARSAFRRRRRSQNLRCRSPRFLNRVKPKGWLPPSLRHRVETTLSFVRRMCRYLPVSGIATELVKFDSQKLQTPEVSGIEYQQGTLFEYEVREYLLEKFGRKCVYCGAEGVPLNIDHVVPRAKGGSNRVSNLVLACVSCNQKKGARSLEDFLKGKPEVLARVRRELKTPLRDAAAVNATRWVLFNELKATGLPVETGSGALTKLNRHAFGVEKEHWLDALCVGRLNGVVTRKGLNVLEIRCMGRGSRQRTRLTKYGFPRGYLMRQKCVHGFATGDMVEANVPKGKKAGLWRGRVAVRVSGSFNIQTPKGVIQGVGWKHCRLISHNDGYGYAWLGHAPHSSPA

SEQ ID NO: 20947 - protein, 413 aa, unidentified
LKVFVLNMRGKPLMPCSPAKARHMLKAGKAFVVRRTPFTIKLTIATGETKQDVTLGVDAGARHVGISATTEKEEVFASEVALRQDITGLLADRLAFRRARRNRKTRYRAPRFNNRVRSKHKGWLAPSVENRIQAHMSRIEAVCRLLPVTKIVIETASFDIQKIRNPEVEGTGYQQGDQLGFWNVREYVLFRDGHVCQHCHGRSRDKILNVHHLESRKTGGDAPNNLITLCETCHKAYHAGKIKLKVKRGQSFRAEAFMGIMRWTLLDRVRKTHPKLPVENTYGYLTKHKRIALGLPKTHCADAFCIAGNLKALRRGDFLFQQQTRKHNRQIHRCSILKGGVRKLNQAPFLVKGFRLFDKVRIGGQIGFVFGRRVRGIFNIRRLDKTVIGTDINCKKLSLLETRKTFLTELRKE

SEQ ID NO: 20948 - protein, 442 aa, unidentified; identical to SEQ ID NO: 2903

SEQ ID NO: 20949 - protein, 428 aa, Moorena sp.; identical to SEQ ID NO: 4771

SEQ ID NO: 20950 - protein, 514 aa, unidentified
MSVLVIGRNGRALMPTNPRKARLLLKKKTASVVCRHPFTIQLLYKTGCATQEGCIGIDTGSQHIGVGITCGDRVILKDEHALRSSMEKRSLLATRTVMRRGRRYRKVRYRKPKWRHHTKRMYFEKANRRGQHWRKVKTTTQSPRLKGWLPPSLQSKCDHHFRIIDRYLKYLPDPITRNLVIEAGRFDMARMNDPTIHGEMYQRGPMYDAENLRAYIFARDNYQCACCKAKAGTTRKADGTTVKLVAHHILFRSRGATDNPKYIISVCDHCHTTKAHQPGGILYSWMENNKKVARGLRDATFMNILRKRLFARYPQAAFTYGNITAADRKQLRLPKNHANDAVAISLFGKEASTVKNICQTMHYKQIRKSKRSLHEAIPRKGRKNPNTKAVRNKKNTTQVNGFKLWDSVLADGKKLFICSFTGTSAYLIDKNGCYISQPGKTYKQCPLSKLKRLHPNVDILPRINPWDSLDYNNITTPYRSGYSMIFQDLATIGVPHLGWYFLPAGQVPVPISLS

SEQ ID NO: 20951 - protein, 435 aa, unidentified; identical to SEQ ID NO: 4695

SEQ ID NO: 20952 - protein, 434 aa, Lactobacillus sp.; identical to SEQ ID NO: 13643

SEQ ID NO: 20953 - protein, 451 aa, unidentified; identical to SEQ ID NO: 2424

SEQ ID NO: 20954 - protein, 502 aa, unidentified; identical to SEQ ID NO: 6049

SEQ ID NO: 20955 - protein, 422 aa, unidentified
MQYVYVLNKHGEPLMPCSPRKARLLLKQKKACVIKRTPFTVKLLYGSTGYKQPVTLGVDAGSKHIGISATTEKHELYREEATPRNDVVDLLSARRAFRRSRRNRKTRYRAPRFDNRVHSKHKGWLAPSVEVKIQEHITLVEHVCRILPVTLVRVETAEFDTQRLKAMLEGKPLPVGTDYQLGEMYDEYNVRQYVLKRDNYTCQCCGAHSTKTKGVKLHVHHIETRRTGGNAPNNLITLCTACHKALHAGKVTLDGKKRGKPLKDAAFMGIMRKTLMERLRKELKIPVQGTYGYITKCLREKNGIPKSHTNDARCISKNPLAIPCDTCYYTKAVRHHNRQLHKATILKGGIRKANQAPYIVKGYRLWDKVSCNGTECFITGRRTSGYFALKKLDGTVVSNSISYKKLRLLEAATKEVKGQSFP

SEQ ID NO: 20956 - protein, 416 aa, unidentified
MVYVLNKDGQPLMPTNRHGKVRRLLKTKKAKVIKRCPFTIQLLYDTTNHTQNITLGVDAGSKHIGLSAATEDRVLFEADVELRNDISKLLEARHTFRCSRRNRKTRYRKKRFDNRVSSKHKGWLAPSIEHKIQSHFAMVEKVHRILPVTKIVVETASFDTQLLKAQLEGKPIPEGTDYQNGELAGWNIREYIFHRDNYTCQWCKGKSKDPVLVTHHHAYWKGDHTNKPSSLITLCNTCNDSKYHKKEANRLWGWEPKITNSYKHAVFMGVMRWTFYNRLKEIYPNVSMTYGYITKNTRIENNLPKAHYVDARCISGHPEAKSSGEYFYYKKVRCHNRQLHKANTLKGGIRKRNQAEYTVKGFRLFDRVEYQNNEYFIFGRRASGFFDIRTLDGQKVNKGSISFKKLKLKKQQNLFN

SEQ ID NO: 20957 - protein, 393 aa, unidentified
MDAVAVFSASGKPLMPTNPVRARKLIKKGKAVIYKYRPLFTIRLTERTDGDIQTIEYCCDTGYQHIGLSIKSRKHEYVNERRDLLPNETERHNDSRKYRKARRRRKLRHRACRRDNRHDNQICKDGYAPSIRNKRDQHISLYRSYTEILPVERAVFEMGQFDTQVLKAIEKGEPLPQGKDYQHGERYGYATLREAVFARDDYTCICCGKNAFKDKRILCVHHLGFRIGDRTNRLANLATVCTKCHTPKNHQPKGKLYNLKPELKDFKGATFMTMVRWDMLDKLKVVSKDIQVDVTYGAATKEARRDLKIKKSHANDAYCMGSFHPSHRTDLKRYEKCRRNNRVLSKFYDATYIDIRDGKKKKANALGCNRTKRRESRRSEKNERIYRGEKVSK

SEQ ID NO: 20958 - protein, 420 aa, unidentified; identical to SEQ ID NO: 6212

SEQ ID NO: 20959 - protein, 367 aa, unidentified
YKHVGLSASTEKAELYASEVELRQDVSDLLSARRALRQSRRSRNTRYRAPRFDNRIRTKRKGWLAPTVENRINVHLSRIETVLRLLPVTKITVETASFDTQLLKNPDIAGKEYQEGEQLGFWNVREYVLFRDGHVCQHCHGRSKDPVLNVHHLESRRTGGDSPGNLITLCETCHKALHRGEIKLRAKRGQSFRAETFMGIMRWGVLNRLKASHPKLEVHNTYGYRTKHARIANGIAKSHCADAFCIAGNFGAKRLGEFFFQKQTRRNNRQIHKLSILKHGLRKRNQAPFEVKGFRLFDKVVCQGEEGFIFGRRSSGSFDVRKLDGTRISAGISCKKLRLLEKRRTYLTEIRKEEALPSLSEGRGLRA

SEQ ID NO: 20960 - protein, 420 aa, unidentified; identical to SEQ ID NO: 3504

SEQ ID NO: 20961 - protein, 413 aa, unidentified
MTNYAFVLDVNGKQLAPTKEQKAWFLIRKKRATLVSKYPMVIQLKKEISDEQICKDEICCGIDDGGLYVGVALVQKCKTKNKVVFKGTIEQRNDVKHLMEVRKGYRGYHRFHKRYRQARFNNRKSSKRKERIAPSILQKRQATIRVIKQLNKWINIANYLLEDVAIDIRALTDGYKLYRWQYQQSDRLDENIRKAVILRDDCKCMECGKSNCRLEVHHIKPRRLNGSNTLDNLISLCEKCHQRTEGQEELYMDRYFSILNSTDNKNLNYAQHVMIGKKWLREQLSKLGTLILTTGGDTANKRIDWNIEKSHSNDAICITGLQPDTCNVKEWTIKPMRRQTKAKTDNVLGIKHRDLVEYTFRNGETHRGYVTALYPEQNALNFQSPTKHCKRVNAKKCKLIWKYSKIYWLDNVS

SEQ ID NO: 20962 - protein, 458 aa, unidentified
LTKDENRPSGRTTGLRAEQAEPAGIRKGDTLKVFVLNMRGKPLMPCSPAKARHMLKAGKAVVVRRTPFTIKLTIATGETKQDVTLGVDAGARHVGISATTEKEEVFASEVALRQDITGLLADRLAFRRARRNRKTRYRAPRFNNRVRSKHKGWLAPSVENRIQAHMSRIDAVCRLLPVTKIVIETASFDIQKIKDPSVEGTDYQQGDQLGFWNVREYVLFRDGHVCQHCHGRSKDKILNVHHLESRQTGGDAPNNLITLCETCHKAYHAGKIKLKVKRGQSFRAEAFMGIMRWTLLDRVRKAHPGLPVENTYGYLTKHTRITHGLPKTHCVDAYCIAGNLKAVRRGVYLHQRQMRKHNRQIHKFTVLSKRLEDGTKIGYRKLNQSPYLVHGFRLFDKVRCLGQIGFIFGRRSSGYFDVRRLDGVKLSPSISWRKLTLLEKRSTYLTELRKQDGASSPV

SEQ ID NO: 20963 - protein, 450 aa, unidentified; identical to SEQ ID NO: 2935

SEQ ID NO: 20964 - protein, 417 aa, unidentified
MPCSPAKARLLLKERKAIVKRRTPFTIQLTIATGEAKQPVTLGVDSGYKHIGLSATTEKAELYASEVELRQDITDLLSARLALRRSRRSRKTRYRVPRFDNRVASKRKGWLAPSVENRITAHMSRVEAVMRVLPVTAITVETAAFDTQLLKNPDITGAAYQQGEQLRFWNVREYVLFRDGHVCQHCRGKSKDPILNVHHIESRRTGGDAPNNLITLCETCHKAFHRGKIKLKVRRGKSFKAETFMGIMRWTLFERLKKAHPELNVRNTYGYLTKHKRISYGIAKSHCADAYCIADNLGAKRLEGFFFQKQTRKHNRQIHKLSILKGGLRKKNQAPHEVKGFRLFDKVICKGEEAFIFGRRTSGSFDVRRLDGTRISAGISYKKLRRLEPRTTYLTEFRKEAALPPLHKCRGLRAEFL

SEQ ID NO: 20965 - protein, 545 aa, unidentified
VQFAWWLCHPKPSDNIEDVNHETALMLLRIKAGTETFGTAPCGSGPKAEGVSPERKAMNTVAVVTNTNKPLMPTSPYRARKLLSSGKAKIVKHRPFTILLVNRSDGNVQEIEYKSDTGYLHVGISVCSEKREFVREQRDLLPDEREKHNDRRKYRRTRRNRKRYRKARFDNRIGKIRKKEKNEHVWLPPSLDHKVDAQVQLFLRLYQVMPIKRAVFEMGQFDPALMKALEKGEAAPQGIDYQMGERYQIATRRAAVFTRDRYACVFCGRSIKDHAILHVHHIGFWKQDRSNRLDNLATCCEQCHTSENHRPGGILYGVEPKLESLASATYMNVVRFELLQRLKEAAPDVEFHISYGAKTSVIRKQRSISKSHTNDAYCLGQYFPKLRAEEIGFQKIRRNDRILQKFYDAEYLDSRDGTTKKGKELTNGRISRNHKKDHENLHQYRGKKLSKGRITIRRGRSSLKPGGLVRFDGEVLTVHGTHRSRKKNKAGHIKVSVNVEFERPSKTGRKSAALSKCQIISRSYNTGWKQIQLRKEEQGRIAAVV

SEQ ID NO: 20966 - protein, 457 aa, unidentified
PVLQPITIAEDPGRSNIGMAVVSLSGELFSAAVVQTRNKEIVKLMDKRKQHRRASRNGERKARQRLAKKCHTMIKAGFLMRKLPMYGKDKRVKCLVIKNTESRFCNRKREDGWLTPSAEHLVQTHINLIHKMQKFLPITDVAIEINRFAFLSLEDPSISGVDFQNGPLKGYDDLNAAIEDLQDGHCLMCNSPIEHRHHIVPRSMQGSNTIGNIAGLCCKCHEKVHKSTAFEDSLKKKKAGLNKRYAAISTLNQAIPFICKRLEQEFGKEHVHYCSGRDTSMVRRSFGYHKTKEEQLHEVDAWCIAVLSLQQIPEKAPEFDHMHEILQFRRQDRSRIKAQTSRAYYYKGKKIAKNRKKAEGQREDSLQEWRKRQVERYGEEQTRKMISQLKVKKSIRRYNRLDRLMPGAVFYYQGVRYVMRGQHCEGTYLQAVGMGSKDFPAKKCKILVHNEGLVFVS

SEQ ID NO: 20967 - protein, 413 aa, unidentified; identical to SEQ ID NO: 12039

SEQ ID NO: 20968 - protein, 430 aa, Desulfobacter sp.
LSVFVLDTNKKPQNPVHPAKARLLLTEGKASVFRQFPFTIILKENVLDVASNPLRIKIDPGSRETGIAVINDDTGEIVFAMELRHRGQQIKNNLESRRAIRRSRRNRKTRYRKPRFDNRIRAEGWLPPSLKSRVHNIETWVNRLCRFCNIQAISMELVRFDMQKIQNPEISGVAYQQGELMGYEVREYLLEKWDRRCAYCGKTDIPLEIEHIVPKSKGGSNRVSNLTLACTACNRKKGNKPIEQFLSRKPRLLKRIQKQSKVPLKDAGAVNTTRWDLFRTLKKTGLPVETGSGGLTKFNRTTRGLHKTHWLDAACVGKSTPEKMFQIDKAVLIVKADGHGSRQMCRMNKFGFPRTTAKSTEKKVKGFQTGDIVKAVVTSGKKVGTYTGRVAVRKSGSFNIKTVDKTVQGISWKYCRLLHASDGYSYNTTC

SEQ ID NO: 20969 - protein, 416 aa, unidentified
MVYVLDKNGQPLMPTDRHRKVRLMLQSGQAKVIKRCPFTIQLTYNTGHQAQEISLGIDAGSKHIGVSTTTKIKVLYEVDVELRNDIVDLLSSRRELRRGRRNRKTRYRQAKFNNRRRGNGWLAPSIRQKIGTHLTVVENICKMLPISRIMVETASFDIQKIKNPDIQGAEYQQGDQLEFWNVREYVLFRDGHTCQCCKGKSKDKILNVHHIESRKTGGNAPNNLITLCETCHTGYHKDTVQLPKAIKRGMRFKDAAFMGIMRWAFYEALKQQYEPVGTPVHNTYGYITKHTRIEHNLPKEHYVDARCISGNPEASSNGEYYYQKKVRCHNRQIHKLTVLKGGIRKQNQATYLVKGYRLFDKVSYQGKGYFVFGRRQSGFFDIRTLSGEKVNKGSLSCKKLKFIATRTYYLTERRAV

SEQ ID NO: 20970 - protein, 371 aa, unidentified
MPDKVYVISRLGHPLMPCSPAKARHLLDDKKAKVVKRMPFTIRLLYGSTKYIQPIILGVDAGSKTIGLSASTAKEEVFAAEVMPRNDVVENLSTRREFRRARRNRTTRYRKPRSDNRVRSNHERWLAPSVKVKIQEHITSIKRVCTILPISKVVIETAEFDLQLLKAIQEGKPIPEGEDYQKGEMYGSYNVCQYVLWRDNYTCICCGVRGTPKNPVRLHVHHFESRKYGGNAPDNHGTLCDDCHKKFHLGIITDVKLKTRRRQSTRDAAFMGIMRKTLMWRLRTELFIPVAETKGYITKATREKLLVLPKSHTRDALAIAQGRHGFGIKEYAYVEPANHIYTVRPVRHHNRQLHKASILKGGIRKRNQASK

SEQ ID NO: 20971 - protein, 416 aa, unidentified; identical to SEQ ID NO: 4039

SEQ ID NO: 20972 - protein, 420 aa, Lachnoclostridium sp.
  source 1..420: note = isolate UBA7210
MIMVYVLNKNGIPLMPTKRHGKVRRMLKNGQAKVVKRCPFTIQLLYDTTNYTQQINLGIDAGSKHIGICAATEKEELYSADIELRKDVVELLSTRRENRRTRRNRKTRYRKARFNNRKKGKGWVAPSIKQKIQCHLQIVKNIHQILPITKIIVETASFDIQKIKSPKIQGKEYQQGEQLDFWNVREYVLFRDNHVCQCCKGESRDNILNVHHIESRKTGGDAPNNLITLCKTCHSGYHKKTIALPETIHRGMSFKDAAFMGIMRWSFYEALKKNYPDVSMTYGYITKNTRISHHLPKYHYIDARCIAGNPDAAPLGYYFYQKKIRCHNRQIHKVNFLKGGKKKRSQASYTIKGFRLFDKVKYKKEIGFIFGRRSSGYFDLRKLNGEVIHRSASYKKIRLLETRKTFLIERRMQDARIATT

SEQ ID NO: 20973 - protein, 428 aa, Enterococcus sp.; identical to SEQ ID NO: 4335

SEQ ID NO: 20974 - protein, 409 aa, Geobacillus sp.; identical to SEQ ID NO: 15350

SEQ ID NO: 20975 - protein, 406 aa, unidentified
MVYVQDIDGKPMMPTTRHGKVRRLLKANKATVVNLCPFTIQLTYKSTDHKQPVTLGIDAGAKHIGFSATTEKEELFACETTLRTDIVDLLSTRSQNRRTRRSRLRYRKSRFNNRGSSKKKGWVAPSVKQRIDSHLNEVNEIHKILPITKIVIEVAQFDTQKMKNHDISGADYQNGEQLGFWNVREYVLFRDGHKCSHCKGKSKDPVLNVHHLESRKTGGDSPSNLITLCESCHKAFHKGEIELKKKRGKSLRDAAVMGIMKWKLYEELKSRYDNVSMTFGYITKHNRIKYGIEKNHTSDAFVISKNFNAKRIEYQYLKRLVRRHNRQIHKMKILKGGKKKNNQAPFEVFGFRLFDKVLYNNEINFIYGRRKSGNFNIRDFNGENPKDVSHKKFKLIRGKRHPIILK

SEQ ID NO: 20976 - protein, 453 aa, Erysipelotrichaceae sp.; identical to SEQ ID NO: 13375

SEQ ID NO: 20977 - protein, 406 aa, Geobacillus sp.; identical to SEQ ID NO: 20875

SEQ ID NO: 20978 - protein, 466 aa, unidentified; identical to SEQ ID NO: 4047

SEQ ID NO: 20979 - protein, 413 aa, unidentified
MTSYAFVLDANGKQLAPTKEQKAWFFIRKKRASLVSKYPIVIQLMKEIPEKEICQDEIRCGIDDGGLHVGIALVQKCKTKNKVVFKGTIEQRNDVKHLMEVRRGYRRYHRYYKRYRQARFDNRKSSKRKERIAPSILQKRQATMRVINRLNKWINITNYWLEDVSVDIRALTDGYKPYRWQYQKSNRLDENIRKAAILRDGGKCMECGKSNCRLEVHHIKPRRRNGSNTLDNLITLCESCHQKTEGQEELYMDRYFSLLKSSDNKNLNYAQHVMIGKMWLRKQLSGLGVLYLTSGGDTANKRIDWNIEKSHANDAVCITDLQPDTCDMKEWTMKPMRRQSKAKTDHVLGIHHRDLVEYTFKNGETHRGYVTALYPEQKAINFQSPTKHCKKVNARKCKLLWNYSKIYWFENAS

SEQ ID NO: 20980 - protein, 416 aa, unidentified; identical to SEQ ID NO: 8117

SEQ ID NO: 20981 - protein, 448 aa, unidentified
MSTGLRAEQAEPAGIRKGDTLKVFVLNMRGKPLMPCSPAKARHMLKAGKAFVVRRTPFTIKLTIATGETKQDVTLGVDAGARHVGISATTEKEEVFASEVALRQDITGLLADRLAFRRARRNRKTRYRAPRFNNRVRSKHKGWLAPSVENRIQAHISRIEAVCRLLPVTKIVIETASFDIQKIRNPEVEGTGYQQGDQLGFWNVREYVLFRDGHICQHCRGRSKDPILNVHHLESRKTGGDAPNNLITLCETCHKAYHAGKIKLKVKRGQSFRAEAFMGIMRWTLLDRVRKTHPKLPVENTYGYLTKNTRIALGLPKTQCADAFCIAGNLKALRRGDFLFQQQTRKHNRQIHKCTVLSKTLKDGTKIGYRKLNQTPHLVKSFRLFDKVRCLGQTGFIFGRRSSGYFDVRRLDGVKFSSGISYRKLTLLEKRSTYLTELRKEDGASSPV

SEQ ID NO: 20982 - protein, 457 aa, unidentified
MPVSERKARLLLKGGKASVYRKVPFTIKLNYKTGSTVQPGYLGIDTGSQHIGVSVVQKDGTVLHKEEIGLRDSMSKRKLLESRASSRRGRRYRKTRYRHPKWKPKTKRIYNEKADRKGRHWKKQKNTFTSKRQAGWLPPSLQSKTDHHIQWIRKLLDLLPEGYRLSIELGRFDPARMKDPEIHGELYQKGPQYDYENVRAYVLARDGYTCRVCKKKGGKLHVHHILYRSRGASDNPKYMAAVCSKCHTTENHLPGGILYQWMQDQKKFTRGLRDATFMNILKKRLRKAFPDAVFTYGNITKADREKLELPKSHGNDATAIALVKTEVKSVKDEEPVIHIQQVRRKKRSLHEETPRKGRKEPNRTASRSDKNTKSVTVTKGSGEKKTSMTACLFDRVELDGKKGWITGFTGTSCYVKDKEDNYICTSPKYKQVSISRLRILHHCGNWAIGAEKPLGKG

SEQ ID NO: 20983 - protein, 420 aa, unidentified
MVYVLNKNNEPVMPCSERKARLLLKQGRAVIYRKDVFTIKLINGSYGYKQHITLGVDCGSKHIGVSATTDKQELFSANAELRNDVVKLLSDRRMLRRSRRFRKTRYRKPRFDNRRIKEGWLAPSIRQKIDSHVRIVSLIHKLLPVKQVNVEVAAFDMQKIKNPDIKSSGYQMGEQLDSYNVREYVLSRDNHICQHCKGKSKDDVLQVHHIESRKTGGNAPNNLVTLCKTCHEKYHSGEITLNVNRGKSFRDASAMSTMRWFLYEELKSRFSNVNITYGYITKYKRIKLGLSKEHYNDAYCITGNLNTSRLCNHHLIRFIPRHSRILHMQKFSKGGVRRSASASYWLNGGKPSKSGAMFTMFDKVKFNGIVCFISGSSNGYAALRDINWNKVHGCKTTVTVNKLALVSRRRGSMLFGELCG

SEQ ID NO: 20984 - protein, 434 aa, unidentified
KAKIIKHHPFTIQLLYDSETNTQPIEICEDVGYNYIGISVKSESHEYVSAQYDTLQDEKDCHDGCRRMRRTRRNRLRYRQARFDNRKRDKGWLAPSLKHKKELNVNVIKMYCEVMPVTHAIVEVGSFDTMLVKAIEEGKATPESADYQKGPRYKLATLREAVFYRNNYTCQVCGRKANEGAILHVHHMFYWKGRHGNSLSELVTVCEKCHTPANHQKGGKLYGFGEDIKFANLSGAAFMNTVRWQIVNELYAAFGKPFVTFTYGAMTKEKRIALHLDKSHSNDAYAMGNFHPVDRCAFEHYEKVKRNNRILEKFYDSRYINIRTGEVASGKELFNGRINRNHKKDSENLHKYRGKRIRKGYRALRRKKVALNPGDLVSLNGEILTVHGTHTKKNGSVNVKFKTPSKSGKKSVSLKKLKIIKTISPMRSAWDKVS

SEQ ID NO: 20985 - protein, 447 aa, unidentified; identical to SEQ ID NO: 5316

SEQ ID NO: 20986 - protein, 442 aa, unidentified; identical to SEQ ID NO: 3791

SEQ ID NO: 20987 - protein, 496 aa, Streptomyces sp.; identical to SEQ ID NO: 4777

SEQ ID NO: 20988 - protein, 424 aa, Anabaena sp.; identical to SEQ ID NO: 6543

SEQ ID NO: 20989 - protein, 483 aa, Oscillochloris sp.; identical to SEQ ID NO: 6098

SEQ ID NO: 20990 - protein, 427 aa, unidentified
LRVFVLNKRGKPLMPCSPAKARLLLKEKKAIVKRRTPFTIQLTITTGETKQPVGLGVDAGYKHVGLSASTDKAELYASQVELRQDITDLLSARRALRRARRNRKTRYRAPRFNNRIRTKRKGWLAPSVENRINAHLSRIEAVLRLLPVTKITVETASFDMLLLKNPDIAGKEYQEGEQLGFWNVREYVLFRDGHVCQHCYGRSKDPVLNVHHLESRRTGGDSPGNLITLCETCHEALHRGEIALKTKRGHSFRAEAFMGMMRWEVLNRLKASHSELEVNNTYGYRTKHARIVNGIDKSHCADAFCIAGNLGAERLCEFFFQKQTRRNNRQIHKLSILKGGIRKRNQAPFEIKGFRLFDKVACKGEESFIFGRRSSGYFDVRKLDGTRISAGISYKKLRLLEKRRTYLTEIRKEEALPPLPEGRGLRA

SEQ ID NO: 20991 - protein, 349 aa, Akkermansia sp.; identical to SEQ ID NO: 5950
  VARIANT 349: note = X can be any naturally occurring amino acid

SEQ ID NO: 20992 - protein, 415 aa, unidentified; identical to SEQ ID NO: 6044

SEQ ID NO: 20993 - protein, 536 aa, unidentified; identical to SEQ ID NO: 4526

SEQ ID NO: 20994 - protein, 529 aa, unidentified
MSTVYVLNKDGKPLMPTTRGGHVRHLLKEQKARVVQSNPFTIQLLYETDDAVQPLYLGIDPGRTNIGVAVVKADGTAVFTAHLKSRNKEIPKLMQDRKRARRARRTNGRRHRRQRRAKANGTISKKCVKQTTTQNGSVSKRAKEIGIIKRHLPGCEKDVLCIGIKNKEAKYTNRERPEGWLTPTANQLLQTHVNLVKKVQKLLPISDVVLEVNKFAFMRLDNPDIQKWQYQQGPLYKKESLESAVSEMQEHHCLFCKKPIDHYHHVVPKSENGSNTIANIVGLCAEHHNLVHKDVAWQEKLAEKKTGLNKKYGALSVLNQIIPALTNKLSVLFPKHFFVTAGKSTHDYRAAHGVSKDHWLDAYCIACSVLPSNVCDSNINNHVPYELKQFRRHDRRVLHKANMSRVYTLNGKAVATNRHKAIKQTTDSLEEFRQNYPDDVYKLKVKEHHPAYRNLNRNYPGSVFLVGEQAHVMQGIASSKDGKTTKYNDTNATTIIAGKCKFVAKNSGILFVQCKFRKALSDGTTKKLQ

SEQ ID NO: 20995 - protein, 419 aa, unidentified; identical to SEQ ID NO: 4688

SEQ ID NO: 20996 - protein, 452 aa, unidentified; identical to SEQ ID NO: 14544
  REGION 1..452: note = IscB polypeptide

SEQ ID NO: 20997 - protein, 428 aa, unidentified; identical to SEQ ID NO: 2743
  REGION 1..428: note = IscB polypeptide

SEQ ID NO: 20998 - protein, 518 aa, unidentified; identical to SEQ ID NO: 2751

SEQ ID NO: 20999 - protein, 465 aa, unidentified
MSTCVCVHSNSGERLMPTFRLGKVRRLLKDGKAKIVKHHPFTIQLLYDSKTNTQPIEICEDVGYNYIGISVKSQSHEYVSAQYDTLQDEKACHDSCRKLRRTRRNRLRYRKPRFDNRKRGEGWLVPSLKHKKELNVNVVKMYCAVMPITHATVEVGSFDTMLVKAIQEGKAIPEGADYQKGPRYNLATLREAVFYRDNYVCKVCGRKATEGAILHMHHMFYWKGRHGNSLDELLTVCEKCHTPANHQKSGKLYGFGENVKFADLSGAAFMNTVRWQIVNELYTAFGKDFVTVTYGAMTKEKRIALHLEKSHNNDAYAMGEFHPNCRCTFEHYEKVRRNNRILEKFYDSRYIDIHTGEIATGKELFNGRINRNHKKDSENLHKYRGKRLYKGHRALVRKKVNFNPGDLVSLNGEVLVVHGTHTNKKGAVNVEFKTPAKNGRKSANLKKLKIVKAAGSIHPAWEKVS

SEQ ID NO: 21000 - protein, 419 aa, unidentified; identical to SEQ ID NO: 17238

SEQ ID NO: 21001 - protein, 408 aa, unidentified
MVYVQDIDGKPMMPTTRHGKVRQLLKDKKAVVINTCPFTIKLMYKTSDYKQEIVLGVDAGTKHVGLSATTKSKELYSSEVILRSDIVDLLSTRRELRRTRRNRLRYRKPRFDNRIKSKRTGWVAPSVRHRIDAHIRVIDNVCSILPISRIIVEVAQFDTQKIKNPNISGNEYQEGNQLSFWNVREYVLTRDGHKCQHCKGKSKDPILNVHHIESRKTGGDSPSNLITLCETCHKEYHKGKIDLRVKRGKSLRDAAVMGIMKWKLYEELRSRYDNVSITFGYITKYNRIKYGIEKSHISDAFVISKNFNALMLEYHYKVRLIRRHNRQIHKQKVLKGGVKKPNQSSFEVFGFRLFDRVMFEGNCYFIFGRRKSGSFNIRDIDGGNQRDITYKKLKLLRCKRFMIQKETN

SEQ ID NO: 21002 - protein, 376 aa, Parasutterella sp.; identical to SEQ ID NO: 11364
  VARIANT 18: note = X can be any naturally occurring amino acid

SEQ ID NO: 21003 - protein, 427 aa, unidentified; identical to SEQ ID NO: 15906

SEQ ID NO: 21004 - protein, 452 aa, unidentified; identical to SEQ ID NO: 4732

SEQ ID NO: 21005 - protein, 506 aa, Halomonas sp.; identical to SEQ ID NO: 8416

SEQ ID NO: 21006 - protein, 439 aa, unidentified; identical to SEQ ID NO: 3280

SEQ ID NO: 21007 - protein, 356 aa, unidentified
MENTLKVFVLNMRGQPLMPCSPPKARKLLRAGKAVPVRRTPFVIQLTVPTGETKQPITLGVDAGYKHVGLSATTAKEELLASEVELRQDVTGLLSNRLALRRARRNRKTRCRAPRFDNRVRSKHKGWLAPSVENRIQAHISRIEAVCRVLPITKIVIETASFDIQKIKNPEVEGTDYQQGEQLGFWNVREYVLFRDGHVCQACKGRSKDLILNVHHIESRKTGGDAPGNLITLCEACHKAYHAGKLKQFSPRRGASFRAETFMGIMRWTVLNRLRERHPELPVTNTYGYLTKHKRIVAGLPKTHCADAFCIAGVLDAKRRGEYLFQKQTRRHNRQIHKLTILKGGVRKRHQAPYLV

SEQ ID NO: 21008 - protein, 408 aa, unidentified; identical to SEQ ID NO: 17248

SEQ ID NO: 21009 - protein, 428 aa, Enterococcus sp.; identical to SEQ ID NO: 7712

SEQ ID NO: 21010 - protein, 275 aa, unidentified
VETASFDMQRLKNPDISGKEYQEGEQLGFWNVREYVLFRDGHVCRHCHGRSKDPVLNVHHLESRRTGSDSPDNLITLCETCHKALHRGEITLKAKRGQSFRAQAFMGIMRREVLNRLKASYPELKVHETYGYLTKHARIANGIVKSHGADAFCIAGNLGAERLGEFFFQKQTRRNNRQIHKLSILKGGIRKRNQAPFEAKGFRLFDKVACQGEEGFIFGRRSSGSFDVRKLDGTRISAGISCKKLRLLEKRRTYLTEIRKEEALPPLPEGRGLRA

SEQ ID NO: 21011 - protein, 512 aa, unidentified; identical to SEQ ID NO: 4446

SEQ ID NO: 21012 - protein, 424 aa, unidentified
MVYVLSKEGTLLMPTNRHGKVRHLLDAGEAKAVKRCPFTIQLLYQSTTYTQDITLGVDAGSKIIGLSASTEKKELYASETKLRTDITDLLSVRRQFRRTRRNRKTRYRKARFNNRVHAKHKGWLAPGIEAKIGTHFRAVRDVCRILPVTEIIVETASFDIQKIKVLENGEPVPEGTDYQEGDQLGFWNVREYVLWRDGYKCRCCNGKSKDQVLNVHHIESRKTGGDAPNNLATLCGYCHKQYHKGTILLPKSVRRGNSFRDAAFMGIMRWTFYNRLKEQYPRVAMTYGYITKNTRIRNNLPKTHYVDARCIAGHPQAEPLDVYYFQKKVRCHNRQIHKANILKGGKKKRNQAEYLVKGYRLYDRVRYQNREYYVFGRRASGFFDIRALGGNKVNKGSVSCKKLRFLEPRKTMLIERRMQEQEAV

SEQ ID NO: 21013 - protein, 419 aa, unidentified
MVYVLDINGQPLMPTTRHGKVRRLLNNHLAKAVKRCPFTIQLLYQSTKETQPVSLGVDAGSKHIGLAAATEKKVVYQEELIPRNDVVKLLSVRRALRYSRRNRKTRYRKSRFNNRVHSKHKGWLAPSVEAKIQEHITAIKRICQILPVSEIHVETAEFDLQRLKAIEEGKPLPVGTDYQLGEQYDFYNTRQYVLHRDGYTCQCCGTHDNNVKLHVHHIESRQTGGNAPNNLITLCEHCHKALHEGKLKLPKGKKRGKSYRDATFMGITRKTLLERLKKEVDVPVTGTYGYITKYWREKAGLEKSHINDAVCISKHPYVEPLDTYYLTKAVRHHNRQIHKVNFSKGGIRKRNQAPHLVKGFRLFDKVLYQGKECFIFGRRVSGRMDIRLLDGIRINASVGYKNLELLELRKAYLTERRTC

SEQ ID NO: 21014 - protein, 419 aa, unidentified
MKKRKDSRRARRTNGRRFRRQRRAKANNTISKKCVKQATAQNGSVSKRAKEIGVIKRHLPGCEKEVLCIGIKNKEAKFSNRTRPEGWLTPTANQLLQTHINLVKKVQKFLPISDVVLEINKFAFMQLDNPNIQKWQYQQGPLYQKESLESAVSEMQEHHCMFCKKPIEHYHHIVPQHKNGSNTIDNIVGLCTKHHGLVHKDIAWQERLAKKKAGFDKKYGALSVLNQIIPALTEGLNTLFPKHFFITTGRSIYDYRATHGVSKDHWLDAYCIACSVLPNDAYDKNINSRVPYELKQFRRHDRRALHKENMNRVYTLNGKKVATNRHKAIEQTADSIEEFRQKHPNDICRLKVKEHHPEYRNPKRIFPGCVFLIGKQAHVTQRTSGSHNGKADGYYDTNGNSYPSGKCKFVAKNEGIVFV

SEQ ID NO: 21015 - protein, 438 aa, Methanosarcina sp.
MIFVLNKNKQLLNPCHPAVARKLLGMGKAVIHKKYPFIIRLKELKKSESNAKFRLKIDYGSRHTGLAILNGSKVTWLAQIHHKTNIKKNMDSRRAMRRARRNRKLRYRKPRFLNRKRNDGWIPPSLQSRVDNIKNWVIRLRKLCPLTHISYENVKFDTQLMQNPEISGIEYQQGELQGYEIREYLLKKMGRKCAYCGAENVPLEVEHIIPKIRGGSSRVSNLTLACRYCNQAKGSMTAEEFGHPEVYDLVKKPLKDVAIVNATRWKIYDILVSIGLKIECGTGGRTKFNRIKLNLPKDHHFDAVCVGQSTPNKINFKTNQVLHIKAKGRGSHCRTNLNKYGFPRGYLARQKSFFGFQTGDIVKAIIPKGKYKGTHIGAISCRKTGYFDIKNKEGMKIAQGINHKYCNVLSRTDGYEYTLNGLEVDGIPLTTKVASILP

SEQ ID NO: 21016 - protein, 306 aa, unidentified
LAPSVEVKIQEHITSIKRVCRILPVSKVVVETAEFDLQLLKAIADGKPVPQGEDYQKGEMYGHYNVRQYVLWRDNYTCQCCGTHPSKKKEVRLHVHHLESRKVGGDAPDNQVTLCESCHEKLHKGLIAEKDFKKRKRKSTRDATFMGIMRKTLMQRLCSELPIPVIETRGYITKATREKLLVLPKSHTNDALAIAQGKRGFNVGYLPEIAQIDKIYTIRPVRHHNRQLHKATILKGGIRKSNQTEKYVFGYRLFDKVQFNGQDCFIWGRRTTGIFTIKTINGKMIKDGISFKKLKLVEKSTSYLIA

SEQ ID NO: 21017 - protein, 416 aa, unidentified
MVYVLDKNGQPLMPTDRHRKVRLRLQSGQAKVIKRCPFTIQLNYDSGHQTQEISLGIDAGSKHIGVSTTTKIKVLYEVDVELRNDIVDLLSSRRELRRGRRNRKTRYRQAKFNNRRRGNGWLAPSIRQKIGTHLTVVENICKMLPISRIMVETASFDIQKIKNPDIQGAEYQQGDQLEFWNVREYVLFRDGHTCQCCKGKSKDKILNVHHIESRKTGGNAPNNLITLCETCHTGYHKGTVQLPKAIKRGMRFKDAAFMGIMRWAFYEALKQQYEPVGTPVHNTYGYITKHTRIAYNLPKEHYVDARCISGNPEASSNGEYYYQKKVRCHNRQIHKLTVLKGGIRKQNQATYLVKGYRLFDKVSYQGKGYFVFGRRQSGFFDIRTLSGEKVNKGSLSCKKLKFIATRTYYLTERRAV

SEQ ID NO: 21018 - protein, 422 aa, unidentified; identical to SEQ ID NO: 5333

SEQ ID NO: 21019 - protein, 420 aa, unidentified; identical to SEQ ID NO: 6507

SEQ ID NO: 21020 - protein, 439 aa, unidentified
VSFVFLVDTNRQPLSPVHPGRARLLLKAGKAAILKRYPFTLILKAAIEQPQAQPLRLKLDPGSRTTGITIVDDASGQVLFAAELAHRSQQIKKALDDRRAVRHGRRARHTRYRKPRFQNRSRPQGWLAPSLQSRVCNIETWVKRLRKLCSIGAISMELVRFDLHLMQNPEISGIQYQQGTLAGYECREYLLAKWSRACSYCGKQNVPLEIEHIVARANGGTDRISNLCLACEPCNKRKGTQDLAVFLAKEPDLLKKIRAQAKAPLKDATAVNSTRWALFKQLKELGLPIECGSGGMTKYNRELRNLPKTHWLDAACVSASTPPVLQVNQIKPLAITAKGHGSRQMCLMNEFGFPRTKPKARHFSHPFHTGDIVKAVVPAHLKHPGVHTGRVSVRAKGAFTISTNQGTVTDIGKKYCQVLQKADGYAYIQKGEAAFPPVP

SEQ ID NO: 21021 - protein, 426 aa, unidentified
LAKDLYRSIDREETNLRVYVLNKRGEPLMPCSAAKARILLKEKKAVVKRRTPFTIQLTIATGETKQSVTLGVDAGYKHIGLSASTEKAELYASEIELRQDVSELLAGRSALRQARRSRKTRHRAPRFDNRKREKGWLAPSVENRIGAHVSRVEAVLRILPVTKIIVKTASFDVQRLKNPDMQGVEYQQGEQLGFWNVREYVLFRDGHECQHCHGKSKDKVLNVHHIESRRTGGDAPNNLITLCETCHKAFHRGEIELKVKRGRSFQAETFMGVMRRTFFERLRASHPEIEVRNTYGYLTKDTRIANKIEKSHCADAFCIAGNLKAKRLGYYFFQKQTRRHNRQIHKLTILKGGVRKRHQTPYEIKGFRLYDKVLYRGKVAFIFSRRSSGYFDIRTLDGERIAASGSYKKLRLLEKRRTFLIELRRN

SEQ ID NO: 21022 - protein, 418 aa, unidentified; identical to SEQ ID NO: 2425

SEQ ID NO: 21023 - protein, 411 aa, unidentified; identical to SEQ ID NO: 5226

SEQ ID NO: 21024 - protein, 392 aa, unidentified
MAIFVLDKKKQPLMPCSEKRARLLLARGRAVVHKRYPFTIRLKNRVGGEAQPLRLGIDPGSKTTGLALMHEPDSQQRHVLCLFELIHRGFQIKKALQQRAAFRRRRRSANLRYRAPRFNNRIKPKGWLAPSLQHRVDTVMAWVNRLSKSAPITGISQELVRFDTQKLESPEISGVEYQQGTLLGYEVREYLLEKWGRECAYCGTTDTPLEIEHVVPRSRGGSNRVSNLTLSCHPCNQSKDALSLVDFFATDKGLKKRLKANGHTANARLERVQRQLKQPLRDASAVNATRWALFSALNATGLPVTVASGGRTKYNRQRLNIPKSHALDAACVGAFEKLHDWTVPTLTIKAMGRGSYQRTRLTKYGFPRGFLMRQKQVHGFQTGHGACDSTHR

SEQ ID NO: 21025 - protein, 493 aa, unidentified; identical to SEQ ID NO: 18058

SEQ ID NO: 21026 - protein, 442 aa, Lactobacillus sp.; identical to SEQ ID NO: 3826

SEQ ID NO: 21027 - protein, 428 aa, Mastigocladus sp.; identical to SEQ ID NO: 9878

SEQ ID NO: 21028 - protein, 413 aa, unidentified; identical to SEQ ID NO: 3295

SEQ ID NO: 21029 - protein, 425 aa, Nodularia sp.; identical to SEQ ID NO: 3113

SEQ ID NO: 21030 - protein, 515 aa, unidentified; identical to SEQ ID NO: 4372

SEQ ID NO: 21031 - protein, 437 aa, unidentified
MPCSEKRARLLIARGRACIHRLVPFVIRLTDREQDTCALQPLRIKLDPGSKTTGLALVRDTEHLNTDTGEIQRGVAVLSLIELVHRGRQISEALTARRQMRRRRRGCLRYRAPRFLNRGNKARGWLAPSLQHRINTTTAWVARIRRWSPVTALSAELVRFDMQRLQNPEISGVEYQQGTLAGYEVREYLLAKWSRKCAYCGVENVPLQIDHVHPKAKGGTNRVSNLTLACGPCNARKSAQSVDAFLAKDPKCLTALLAQAKRPLKDAAAVNATRWALVGALKATGLPVETASGGCTKFNRSRLAIPKTHALDAVCVGAVSVVTNWQKPSLTIKCTGRGSYQRTRLDKYGFPRGYLMREKSVKGFKTGDLVRAIVPTGKKAGVHTGRVAIRKTGSFNIQTLAGVVQGIGYRHCRLLQRADGYGYFFNKAACDTAQKRE

SEQ ID NO: 21032 - protein, 420 aa, unidentified
MQYVYVLNKHGEPLMPCSPGKARLLLKQQKACVVKRTPFTIKLLFGSAGYKQPITLGVDAGSKHVGLSASMEKRELYSEEFTPRSDVVELLSTRRQNRRSRRNRKTRYRAPRFDNRVHSKHKGWLAPSVEVKIQEHITIIKRICKILPISLVRVETAEFDTQRLKAMLAGKPLPVGTDYQLGEMYDEYNVRQYVLKRDNYTCQCCGAHTTAKKLVKLHVHHLESRKTGGNAPSNLVTLCTTCHKNLHKGRVTLDGKERGKPLRDAAFMGIMRKTLMVRLKEELPIPVQGTYGYITKMRREQNDIKKSHVNDARCISKHPLAEPCSVCYRTKAIRHHNRQTHKANFSKGGIRKRSQMPYVVEGYRLWDKVLYKGQECFVSGRRASGSFTLKKLDGTRISKGVTFKKLRLLEPATNYLIERM

SEQ ID NO: 21033 - protein, 431 aa, unidentified; identical to SEQ ID NO: 2746

SEQ ID NO: 21034 - protein, 413 aa, unidentified
MTSYAFVLDANGKQLAPAKEQKAWFLIRKKRAALVSKYPMVIQLKKEIPENEICKDEIRCGIDDGGLHVGIALVQKCKTKNKVVFKGTIEQRNDVKHLMEVRRSYRHYHRYHKRYRPARFDNRKSSKRKKRIAPSILQKRQAIIRVIHWLNKWINITNYWLEDVSIDIRALTDGYKPYRWQYQKSNRLDENIRKAAILRDGGKCMECGKLNCRLEVHHIKPRRRNGSDTLDNLITLCKSCHQKTEGQEELYMDRYFSLLKSSDHKNLNYAQHVMIGKEWLRKQLSSLGVLYLTNGGDTANKRIDWNIEKSHANDAVCITNLQPDTYDMKEWTVKPMRRQSKAKTDNVLGIKHRDLVEYTLKNGETHRGYVTALYPDQKAINFQSQTKHCKKVNARKCKLLWKYSKIYWFENAS

SEQ ID NO: 21035 - protein, 416 aa, unidentified
MVYVLDKNGQPLMPTDRHRKVRLMLQSGQAKVIKRCPFTIQLNYDSGHQTQEISLGIDAGSKHIGVSATTKTRVLYEADVELRNDIVDLLSSRRELRRGRRNRKTRYRQAKFNNRRRGNGWLAPSIRQKIGTHLTVVENICKMLPISRIMVETASFDIQKIKNPDIQGAEYQQGDQLEFWNVREYVLFRDGHTCQCCKGKSKDKILNVHHIESRKTGGNAPNNLITLCETCHTGYHKGTVQLPKAIKRGMRFKDAAFMGIMRWAFYEALKQQYEPVGTPVHNTYGYITKHTRIEHNLPKEHYVDARCISGNPDAFPNGEYYYQKKVRCHNRQMHKLTILKGGIRKQNQATYLVKGYRLFDKVSYQRKEYFVFGRRKSGFFDIRTLSGKQVNKGSLSCKKLKFIATRMYYLIERRAV

SEQ ID NO: 21036 - protein, 518 aa, unidentified; identical to SEQ ID NO: 8622

SEQ ID NO: 21037 - protein, 332 aa, Desulfobacter sp.
  source 1..332: note = isolate UBA2225
LNVFVLDTNKKPQNPVHPAKARFLLSEEKAAVFRQYPFTIILKEEIGVNPQALRVKIDPGSKTSGIAVTDDATGEIVFAMQLEHRGQQIKNDLESRRAIRRSRRNRKTRYRKPRFENRIRPEGWLAPSLKSRVHNIETWVNRLCRFSNIQEISMELVRFDMQKIQNSEISGVEYQQGALSGYEVREYLLEKWGRTCVYCGKTNLPLEIEHILPKSKGGSNRVSNLTLACTECNQKKGNRPIDIFLSKRPELLKRIQARAKAKSRKKKVNGFQTGDIAKAIVTSGKKVGTYIGRVAVRKSGFFNIKTRETTIQGINWTYCHMLHMSDGYSYNI

SEQ ID NO: 21038 - protein, 423 aa, unidentified
LVWNKRGKPLMPCSPAKARLLLKEKKAIVVRRTPFTIQLTIATGESKQPVSLGVDAGYKHVGLSASTEKAELYASEVELRQDITDLLSARRALRQSRRNRKTRYRAPRFDNRIRTKRKGWLAPSVENRINAHLSRIETVIRLLPVTKISVETTSFDMQLLKNSDIAGKKYQESEQLGFWNVREYVLFRDGHVCQHCHGRSKDPVLNVHHLESRRTGGDSPGNLITLCETCHKELHRGEITLKAKRGQSFRAETFMGIMRWEVLDRLKASHPKLEVQNTYGYRTKHARIVNGIAKSHCADAFCIAGNLGAERLGEFLFQKQTRRNNRQIHKLSILKGGIRKRNQVPFEVKGFRLFDKVACKGEEGFIFGRRSSGYFDVRKLDGTHISAGISYKKLRLLEKRQTYLTEIRKEALPPLPEGRGLRA

SEQ ID NO: 21039 - protein, 462 aa, unidentified; identical to SEQ ID NO: 5636

SEQ ID NO: 21040 - protein, 462 aa, unidentified
MSVLVIGRNGRALMPTTSRKARLLLKKKIASVVCRHPFTIQLLYKTGCATQEGCIGIDTGSQHIGVGVTCGDRVILKEEHELRSSMEKRSLLVARAAMRRGRRYRKVRYRKPKWRHHTKRMYFEKPNRRGQHWRKVKTTTQSPRPKGWLPPSLQSKCDHHFRIIDRYLKYLPDSITRNLVIEVGRFDMARMNDPMIHGEMYQRGPMYDAENLKAYIFARDGYQCACCKAKAGTTRKTDGTTVKLVAHHILFRSRGATDNPKYMVSVCDHCHTTKAHQPGGVLYSWMERNKKVTRGLRDAAFMNILRQRLFARYPQAAFTYGNITAADRKQLRLPKSHANDAVAISLFGKEVSAVRDTCQTVHYKQVRKSKRSLHEAIPRKGRKRPNTKAVRNKKNTTQVNGFKLWDSVLANGKKLFICSFTGTSAYLVDKNGCYVSQPGKTYKQWPLSKLKRLHPNGNWLVT

SEQ ID NO: 21041 - protein, 418 aa, unidentified
MVYVINKEGQALMPTERFGKVRRLLKNGLAHVVCRIPFTIRLDYETTHFVQPISLGVDAGSKHIGISATTSEKELYAADVELRNDIVEKLSTRREQRRTRRNRLRYRKARFNNRVSSKHKGWLAPSVENKIQTHLTVVEKIHKFLPITKIIVETASFDIQKIKNPSISSKEYQQGEQLDFFNVREYVLFRDNHTCQHCKGKSKDHILNVHHIESRKTGGNSPSNLITLCESCHKAYHNGKIDIKIKRGASFRDATFMGIARWTTYERLKNIYPNVSMTFGYITKNTRITNGLPKEHHVDARCISGNPKSKPLGYYFYQKKVRCQNRQIHKANFLKGGRKKLNQSPFLVKGYRLFDLVEYQKELYYIFGRRDRGFFDIRKLDGTKVNKGSISCKHIRLVDIRRNIITERRNSCSIPPTN

SEQ ID NO: 21042 - protein, 512 aa, unidentified; identical to SEQ ID NO: 6489

SEQ ID NO: 21043 - protein, 407 aa, unidentified
LMPCSPGKARLLLKHQKACVVKRTPFTIKLLYGSAGYKQPITLGVDAGSKHVGLSASTEKRELYSEEFTPRNDVVELLSTRRQNRRSRRNRKTRYRAPRFNNRVHSKHKGWLAPSVEVKIQEHITVIKRICRILPVTLVRVETAEFDTQRLKAMLAGKPLPVGTDYQLGEMYDEYNVRQYVLKRDNYTCQCCGAHTTAKKAVKLHVHHLESRKVSGNTPSNLITLCVTCHNNLHKGKVTLDGKKRGKTLRDAAFMGIMRSTLLERLRNELRVPVQNTYGYITKLLREQNDIKKSHVNDARCISKHPLAEPCSVCYRTKAIRHHNRQIHKAKILKGGIRKANQAPYIVKGFRLWDKVLYDGQECFISGRRSSGYFTLRKLDGTAITNSISFKKLWLLEPATNYLIERK

SEQ ID NO: 21044 - protein, 424 aa, unidentified; identical to SEQ ID NO: 5018

SEQ ID NO: 21045 - protein, 415 aa, Bacillus sp.
MRVFVKNVRGEPLMPCRNRKARLLLKQGKAKIVTYTPFTIQLLYATGETVQSVAIGVDSGAKYIGIAITTADKVLAKGTIQLRQDVKENLILRATLRRGRRQRKTRYRKARFLNRKKKEGWLPPSIQSRVDNQIHWIETFRSLLPSPKVIVEVGKFDAQKLKNPDIQGIEYRQGDAFGFWNTRYYVFARDNYTCQICKKKGGILHTHHIIERCNGGSDMAENLVTVHEECHEKLHQGKIKHRFPKPKQYKESAFMNILRLQIMNRLDCDITYGSYTTPKRKELGLTKTHANDAIAITNPIQLQEYDQSGEFCIKQFRKKKRALHEATARKGRKTKNTRAKRNKKNTSHIDGIYLGDKVEVFGQVGFVTGFTGKMVYVQNIHGQYIKNPSKSYKQVKMSDMERIHHTNNWQFLHIS

SEQ ID NO: 21046 - protein, 439 aa, unidentified
LRVFVKNKRNQSLMPCKPQRARLLLKQGKAKIIDYKPFTIQLLYATGETTQQIKVGIDSGAKYIGFAITSGNKVFGKGTIELRDDVSKLLTARRTYRRSRRNRKTRYRKPRFENRAKPEGWLPPSIQSRIDNTINWINKIANALPAPEITVEVGKFDAAKLKNPDIQGKEYQNGEAFGFWNTRYYIFARDNYTCQICKKKGGILQTHHIIPKRNGGTDKADNLVTAHIGCHADFHKGRVQHTFKKPKQYRETVFMNVLRRRISKQVNCEITYGSYTKIARDTLALDKSHYNDAIAIAGIKTIKSNPNAVLYIKQFRKKKRSLHEAIPRKGRKIPNRTAKRNGKNTKQLKGIFLGDTVSVFGQRGYVSGFTGTNGFYVKTIDNEYIKKPGKTYKQVGYKDITFISHNNNWQLSTKNVPIHPPPNQRFGRGLLGAGVKREM

SEQ ID NO: 21047 - protein, 411 aa, unidentified
MPCSQRKARLLLKNKKAKIYSYHPFTIQLFYASGETIQMCHIGVDTGSRHIGLAITSENKVLLKGEIDLRQDVKSNLDTRRTYRRNRRNRKTRYRKARFFNRVKSKQKNWLPPSIESKIHHTFHWMNKLENLVADSNLHIEVGKFDMAKMIRPDIQGKEYSQGQCYGYFDTRYFVFARDDYTCQCCKKKNKILKTHHILYRSNGGTDRADNLITVCTDCHTSKNHKKGGILYEWQQRHKKGKPYKEPPFMNIIRKRIYQKYPDAVISYGSQTTPKRKERNLDKTHYNDAIIISGIEDIKENPKEWLRIKQFRKKKRSLHEAAARKGRKEHNRTQKRNRKNTSYDKGWYLNDYVEVFGKKGYISGFTNSGVYIKNTNDDYITMPDKKYKQVSLCNIVRICHNNNWQYEIQKI

SEQ ID NO: 21048 - protein, 430 aa, unidentified
MPKVYVLNRHGRPLMPCTPAKARHLLDAGKAKVRHRTPFTIQLLYGSTGYTQEVILGVDAGSKTIGLSAATETEELFSTEVKPRNDVVELMSARRQFRRARRNRTTRYRKPRFDNRVRSKHKGWLAPSVEVKIQEHMTAIRRACAILPVSKVVVETAEFDLQLLKAVAEGKPVPQGEDYQKGEMYGHYNVRQYVLWRDSYTCCICGVHGSVRKGVPLHVHHLESRRVGGDAPDNLVTLCTACHDKLHKGIIMAADIKKRKRRSTRDATFMGIMRMTLLRRLREQLPVPVVETRGYITKATRENLLVLPKSHANDALAIAHGPQGFRAEHLPNIRQADRLYTIRPVRHHNRQLHKATILKGGVRKTNQAEKYICGFRLYDKVLYNGIECFVWGRRTSGSFLLRQLNGEKVKDGVSYKHLKLLERSQSYLVA

SEQ ID NO: 21049 - protein, 416 aa, unidentified; identical to SEQ ID NO: 8117

SEQ ID NO: 21050 - protein, 449 aa, unidentified; identical to SEQ ID NO: 13052

SEQ ID NO: 21051 - protein, 242 aa, unidentified
MPNKVYVINKHGRPLMPCSPAKARHLLDEGKAKVKKRTPFTIQLVYGSSGYTQEVILGVDAGSKSIEISASTKKEEVFAADVTPRNDVVDLLSTRREFRRARRNRKTRYRKPRFNNRVRSKHKGWLAPSVEVKIQEHITSIKMVCRILPVSKVVVETAEFDLQLLKAIEEGKPVPQGEDYQQGEMYGHYNVRQYVLWRDNYTCQCCGAHPTKKKEVRLHVHHLESRKTGGDAPGNLVTLWRC

SEQ ID NO: 21052 - protein, 428 aa, Enterococcus sp.; identical to SEQ ID NO: 4335

SEQ ID NO: 21053 - protein, 451 aa, unidentified; identical to SEQ ID NO: 3061

SEQ ID NO: 21054 - protein, 431 aa, unidentified
MPNKVYVINKHGRPLMPCSPAKARHLLDEGKAKVKKRTPFTIQLVYGSSGYTQEVILGVDAGSKTIGLSASAETEELLSAEVKPRNDVVDLLSTRREFRRARRNRKTRYRKPRFDNRVRSKHKGWLAPSVEVKIQEHITSIKRVCRILPVSKVVIETAEFDLQLLKAIADGKPVPQGEDYQKGEMYGHYNVRQYVLWRDDYTCQCCGAHATKKKEVRLHVHHLESRKVGGDAPDNQVTLCESCHEKLHKGLIAEKDFKKRKRRSTWDATFMGIMRKTLMQRLCSELPIHVVETRGYITKATREKLLVLPKSHINDALAIAQGKHGFNVGYLPGILQIDMIYTIRPVRHHNRQLHKATILKGGIRKSNQTGKYVFGYRLFDKVQFNGQDCFIWGRRTSGYFVVKTIDGKVIHNSASFKKLNLVERASNYLIA

SEQ ID NO: 21055 - protein, 416 aa, unidentified
MVYVLSQNGQPLMPTENHAKVRVFLKQGKAKVVQRCPFTIQLLYESTTHTQKINLGIDAGSKTIGISATTDSKVLYEAEVVLRNDIVELLSGRRALRRSRRNRKTRYRKPRFDNRKKPDGWLAPSIRQKIETHVTVVENITKILPMTKIIVETASFDIQKIKNPEIEGAEYQHGEQLDFWNVREYVLFRDGHTCQCCKGKSKDNILNVHHIESRKTGGNAPNNLITLCETCHKAYHKGIITLPKEIHRGMRFRDAAFMGIMRWAFYDRLKELYNPLGAEVINTYGYITKNTRITYDLPKEHYVDARCISGNPAAKPMDYYYLQKKVRCHNRQIHKCKINKGGTRKRNQAAYEVKGFRLYDQVLWKGQKCFIFARRSTGRMDLRLLDGTHVNASVGYKNLKLLSMRKNYLIEQRKAG

SEQ ID NO: 21056 - protein, 418 aa, unidentified
MVYVLGQDGHPLMPTCRHGKVRRMLKSGMAKVVQRCPFTIQLQYESTTHTQKINLGIDAGSKTIGVSATTESKVLYESEVVLRNDIVELLSGRRALRRSRRNRKTKYRKPRFDNRRRPDGWLTPSIRQKIKTHVTVVENVMKILPVTKIIVETASFDIQKIKNPEIEGAEYQYGEQLDFWNVREYVLFRDGHTCQCCKGKSKDNILNVHHIESRKTGGNAPNNLITLCETCHQAYHKGVITLPKEIHRGMRFRDAAFMGIMRWAFYDRLKELYTPFGVEVINTYGYITKNTRIEHGLPKEHYVDARCISGNPAAKPLGHYYFQKKVRCHNRQIHKNTILKGGIRKRNQAAYLVNGYRLFDKVKYQNQEYFIFGRRSSGFFDIRTLDGTKVNKGSISCKKLQLVEKSKHYLTEQRKVAA

SEQ ID NO: 21057 - protein, 425 aa, Nodularia sp.; identical to SEQ ID NO: 3165

SEQ ID NO: 21058 - protein, 412 aa, unidentified; identical to SEQ ID NO: 3155

SEQ ID NO: 21059 - protein, 424 aa, Anaerostipes sp.; identical to SEQ ID NO: 3434

SEQ ID NO: 21060 - protein, 484 aa, Deinococcus sp.; identical to SEQ ID NO: 17517

SEQ ID NO: 21061 - protein, 515 aa, unidentified; identical to SEQ ID NO: 5111

SEQ ID NO: 21062 - protein, 438 aa, unidentified; identical to SEQ ID NO: 8266

SEQ ID NO: 21063 - protein, 416 aa, unidentified; identical to SEQ ID NO: 7785

SEQ ID NO: 21064 - protein, 356 aa, unidentified
QEIVLGVDAGTKHVGLSATTKSKELYSSEVILRNDIVDLLSTRRELRKARRNRLRYRKPRFDNRIKSKRPGWVAPSVKYKIDAHIRVIDNVCSILPIFRIVIEVAQFDTQKINNPNISGKEYQEGDQLGFWNTREYVLARDGHKCQYCKGKSKSKILNVHHIESRKTGGDSPSNLITLCETCHKEYHKGNIDLKIRRGKSLRDAAVMGIMKWRLYEELKSRYDRVFMTFGYITKHNRIKYGIEKSHTSDAFVISKNINAKRIERQYLKRLIRRHNRQIHKMKILKGGKKKNNQAPFEVFGFRLFDKVLYNNKIFFVYGRRKSGSFNIRDFNGENSKDVSRKKFKLIRGKRHPIILK

SEQ ID NO: 21065 - protein, 532 aa, unidentified; identical to SEQ ID NO: 3169

SEQ ID NO: 21066 - protein, 462 aa, Halothiobacillus sp.
METRYGMAVLVLDKRKQPLMPCSEKRARLLLDRDRAVVVRVHPFTIRLKDRVGGSTQPVRIKIDPGSRATGMAMVRESGDGIQHVLWLGEIAHRGHVIRDQLAQRRAFRRRRRSNLRHRPARFNNRRRSAGWLAPSLQHRVDTTTAWVRRLRRWAPVTAVSQELVRFDTQRMESADISGVAYQRGTLLGTQVREYLLHRHQHQCAYCHGQSGDPVLEVEHVHPKSRGGSNRVGNLVIACRDCNKVKENRDAGEWARDLAPARGRLDVARRHNAALVDAGKRPSLRDASAVNSTRWALFQALKAAGLQVAVGTGGRTKWNRQRLGIPKGHALDAACVGEVEAVSGWNRPVLAIKAAGRGSYQRTRLTRHGFPRGYLMRHKQVRGFQTGDHVQAVVGAGKKAGTHTGRLAVRASGRFNIQTPAGVIQGISHRHCTLTQRADGYGYFVQSKIAATETEEARTEAA

SEQ ID NO: 21067 - protein, 431 aa, unidentified
MPNKVYVINKHGRPLMPCSPAKARHLLDEGKAKVKKRTPFTIQLVYGSSGYTQEVILGVDAGSKTIGMSASTTKEELLSAEVKPRNDVVDLLSTRREFRRAQRNRKTRYRKPRFDNRVRSKHKGWLAPSVEVKIQEHITAIRRVCGILPVSKVVIETAEFDLQLLKAIADGKPVPQGEDYQQGEMYGHYNVRQYVLWRDGYTCQCCGAHATKKKEVRLHVHHLESRKVGGDAPDNQVTLCESCHEKLHKGLIAEKDFKKRKRKSTRDATFMGIMRKTLMQRLCSELPIPVIETRGYITKATREKLLVLPKSHTNDALAIAQGKQGFNVGYLPGIVQINKIYTIRPVRHHNRQLHKATILKGGIRKSNQTKKYVFGYRLFDKVQFNEQDCFIWGRRTTGIFTIKTINGKMIKDGISFKKLKLAEKSTSYLIA

SEQ ID NO: 21068 - protein, 423 aa, Moorena sp.
MRVFVLNKNLQPLDPCRPARARILLSTGKAKVYRRYPFTIILVEEISNPVTHEHQLKIDPGAKTTGLAVVQRQRVVWGAELTHRGFQIRDNLTSRRQLRRSRRNRKTRYRKPRFLNRTRAKGWLAPSLVSRIENSLTWVKKIIRFCPITGISQELVRFDTQKLQNPELSGIEYQQGTLHGYEIREYLLEKWNRKCAYCGAKDTRLEVEHIKPKSKGGSNRISNLTLACHSCNQAKSNQDIELFLAKKPDLSKRILSQAKRPLSDAASVNITRWKLYHDLKSITLPVEVGSGGLTKFNRCRQNLPKTHWLDAANVGKVETLIIEVNNPLLITAKGHGTRQLCRTNKYGFPIRYCSRLKFHKGFQTGDIIRAVVTKGKKIGTYVGRVATRKSGSFNISTKSGLVQGISHKYCQFIHRKDGYAYTN

SEQ ID NO: 21069 - protein, 428 aa, unidentified
LKVFVLNMRGQPLMPCSPAKARHLLKAGKAVVKRRTSFTIQLRIATGETKQNVTLGVDAGAKHVGLSAATEKEEVFASEVELRQDITGLLAARLSLRRDRRHRKTRYRPPRFLNRVRSKHKGWLAPSVENRIQAHMSRIDAVCRLLPVTKIVIETASFDIQKIKDPSVEGTDYQQGDQLGFWNVREYVLFRDGHVCQHCHGRSKDKILNVHHLESRQTGGDAPNNLITLCETCHKAYHAGKIKLKVKRGQSFRAEAFMGIMRWTLLDRVRKAHPGLPVENTYGYLTKHTRITHGLPKTHCVDAYCIAGNLKAVRRGVYLHQRQMRKHNRQIHKFTVLSKRLEDGTKIGYRKLNQSPYLVHGFRLFDKVRCLGQIGFIFGRRSSGYFDVQRLDGVKLSPSISWRKLTLLEKRSTYLTELRKQDGASSPV

SEQ ID NO: 21070 - protein, 489 aa, unidentified
MTMVYVQNKDGKPLMPTTRYCYVRLLLKENKARVVSSTPFTIQLNYDTPDVTQDLILGIDPGRTNIGVAVVKEDGQCVFSAHLETRNKDVPLLMKKRAAFRRNHRTLGRRRKRQRRAKAAGTTVENESIKRLLPGYEKPVICHHIRNRKARFNNRCRPQGWLTPTANHLLQTHINLIAKVEKFLPITTVVVELNRFAFMAMDNPNIRRWECQQGPLYGLGSVEDAVYSQQDGHCLFCKKPIDHYHHVVPRHKGGSETLANRCGLCVKHHDLVHKDKAWADKLVTRKEGMNKKYHALSVLNQIIPHLLEYLGDETHYDVYATDGRSTKGFRIAKSVPKEHYTDAYCIACSILDTDIEVSVPVEPFELKQFRRHDRQACIRQMVDRKYLLDGKVIAVNRHKAIEQKSDSLQEFREAYGDAVVSQLAVKPHLPQYKDMTRIMPGAMMDFNGTIGVMQSSIVGSFYKSTKGHKATPKNCVLLAQNAGMVFIPA

SEQ ID NO: 21071 - protein, 414 aa, unidentified
MPCSPAKARLLLKEKKAIVVRRTPFTIQLTIATGESKQPVSLGVDAGYKHVGLSASTEKAELYASEVELRQDITDLLSARRALRQSRRNRKTRYRAPRFDNRIRTKRKGWLAPSVENRINAHLSRIETVIRLLPVTKITVETTSFDMQLLKNSDIAGKKYQEGEQLGFWNVREYVLFRDGHVCQHCHGRSKDPVLNVHHLESRRTGGDSPGNLITLCETCHKELHRGEITLKAKRGQSFRAETFMGIMRWEVLDRLKASHPKLEVQNTYGYRTKHARIVNGIAKSHCADAFCIAGNLGAERLGEFFFQKQTRRNNRQIHKLSILKGGIRKRNQAPYEIKGFRLFDKVACQGEEGFIFGRRSSGYFDVRKLDGTRISAGISYKKLRLLEKRQTYLTEIRKEEALPPLPEGRGLRA

SEQ ID NO: 21072 - protein, 437 aa, unidentified
KDGKAKIIKHHPFTIQLLYDSKTNTQPIEICEDVGYNYIGISVKSQSHEYVSAQYDTLQDEKACHDSCRKLRRTRRNRLRYRKPRFDNRKRGEGWLAPSLKHKKELNVNVVKMYCAVMPITHATVEVGSFDTMLVKAIQEGKAIPEGADYQKGPRYNLATLREAVFYRDNYTCQVCGRKVADGAILHMHHMFYWKGRHGNSLSELITVCEKCHTPANHQKSGKLYGFGENVKFADLSGAAFMNTVRWQIVNELYAAFGKDFVTVTYGAMTKEKRIALHLEKSHNNDAYAMGSFHPVNRCAFEHYEKVKRNNRILEKFYDSQYIDTRTGELTNGKSLFNGRISRSHKKDSENLHKYRGKRICKGHRALRRKKLALNPGDLVSLNGEILVVHGTHTKKNGSVNVEFKTPSRSGKKSASLKKLKIVKTSNLMHSAWTKVA

SEQ ID NO: 21073 - protein, 431 aa, unidentified
MPNKVYVINKHGRPLMPCSPAKARHLLDAGKAKVKKRTPFTIQLVYGSSGYTQEVILGVDAGSKTIGVSALTKKEELFAANVIPRNDVVDLLSTRREFRRARRNRKTRYRKPRFDNRVRSKHKGWLAPSVEVKIQEHIIAIRRVCGILPVSKVVVETAEFDLQLLKAIADGKPVPQGEDYQKGEMYGHYNVRQYVLWRDNYTCQCCGAHATKKKEVRLHVHHLESRKVGGDAPDNQVTLCESCHEKLHKGLIAEKDFKKRKRRSTRDATFMGIMRKTLMQRLCSELPIPVVKTRGYITKATREKLLVLPKSHTNDALAIAQGKRGFNVGYLPEIAQIDKIYTIRPVRHHNRQLHKATILKGGIRKSNQAGKYVFGYRLFDKVQFNGQDCFIWGRRTSGYFAVKTIDGKVIHNSASFKKLNLVERASNYLIA

SEQ ID NO: 21074 - protein, 470 aa, unidentified; identical to SEQ ID NO: 17072

SEQ ID NO: 21075 - protein, 426 aa, unidentified
MVFVLDTKKRPLAPCHEAVARKLLKQGKAAIYKRYPFTIILKEIVDNFRPKTPYRLKIDYGSKHTGLVIVRGEEVLWLAQLDHRIDIKERLDKRLAFRRARRKRKTRYRKPRFLNRRRKDGWLPPSLESRVQNIQTWVERLRKICPIEHISYENAKFDTQLMRNPEINGVEYQQGTLQGYEVREYLLEKFGRKCCYCGKEGVPLEVEHIIPKSRGGTDRIDNLCLACRDCNQRKGSQAAEEFGYPHIQKQVKESLKDTSAINSTRWKVYEVLKQTGLDVECGTGARTKMNRIRLDLPKTHYFDACCVGESTPNHLYFKTKEVLFIRAKGRGSRSRTNLDRYGFPRGYLARQKFFFGFQTGDMVKVVIPRGKYKGVWFGEVACRKTGSFDIKGKDGKRIAQGINYRYVQVIQRFDGYAYGKVVAELA

SEQ ID NO: 21076 - protein, 408 aa, unidentified; identical to SEQ ID NO: 4709

SEQ ID NO: 21077 - protein, 432 aa, Thiorhodovibrio sp.; identical to SEQ ID NO: 5239

SEQ ID NO: 21078 - protein, 420 aa, unidentified
LVYVISKTGQPIMPTENHAKVRILLKFGKAKVVRRTPFTIQLTGTSKTFTQEVTLGVDAGSKHVGLSASTVKKELFVAELRPRNDVVNLIASRRELRRSRRSRTTRYRQARFNNRVHSKHKGWLAPSVEVKIWNHIQGIKLVARLLPVKTIRVETAEFDLQRLKALESGEPVPVGTDYQLGEMYGQYSVRQYVLHRDGYSCQCCGAHGTDKKPVKLHVHHLETRKTGGDAPDNLITLCEDCHTGYHAGTVALSTTKRRRKSTRDAAFMGVMRKTLLERLCNMFPETNICSTYGYITKYWREKKNIVKTHTSDAFVIAKNLDAKRLDKSLLIVPKRQHNRQIHKCKINKGGTRKLNQTPKFVFGYQLFDRVMCMKQEGFVFARRSSGGFDVRKLNGEKINPYINYKKLKRLESRKALLISY

SEQ ID NO: 21079 - protein, 474 aa, unidentified
MWLNSSEGKEQCCIHGNLGKTLGKDSHSLQRGQFCLSLTVTTTRKETTSMYVYVLNQHGEPLMPCSPRKARIMLRDHKATVVRRTPFTIRLLHRSSEYKQDITLGVDAGSKFIGLSACTESKELFAAEVKPRNDVVELLSTRRELRRSRRNRKTRYRAVRFNNRVHSKHKGWLAPSVEVKIQEHITAIKRTCAILPISVVIVETAEFDVQRLKAMLEGKPLPVGTDYQLGEMYDEYNVRQYVLKRDTYTCQCCGIQSTDKAPVKFAVHHKESRHVGGNAPNNLITLCEKCHRLLHAGVVTLEEGKRKRGKSFRDAAFMGIMRKTLMRRLRNELSIPVKETYGYITKLLRETHAIQKSHVNDARCIARVPDAQPSDTLYRIRAVRHHNRQLHKVNPIKGGIRKRNQAPYEVFGFRLWDKVLFNGQECFITGRRVRGYFALKNFDGKKVHTGAPYTALTIVESSTSYLIERRGETT

SEQ ID NO: 21080 - protein, 423 aa, Moorena sp.
MRVFVLNSNRQPLDPCKPARARILLSTGKAKVYRRYPFTIILTEEIQEPITHGSQFKIDPGAKTSGLAIVQGNRIVWGGELTHRGFQIRDALTSRRQLRCARRNRKTRYRKPRFLNRSRPEGWLAPSLMSRVHNILTWVKKLTRLCPIAGISQELVRFDTQKLQNPEISGIEYQQGTLYGYELREYLLEKWNRKCAYCGTTGTQLEIEHIKPLSKGGSNRVSNLAIACHSCNQSKSDQEIEQFLSGKPDVLKRVLSQAKRPLADAAAVNTTRWKLYHELKSIGLPVEVGSGGLTKFNRCRQNLPKTHWLDAANVGKVDTLIIEGYQPLLIAAKGHGTRKICRTNKYGFPIRYCSRTKIHKGFQTGDIVRAVVTKGKKIGTYVGRVATRKSGSFNISTKSGLVQGISHKYCQFIHRKDGYAYRH

SEQ ID NO: 21081 - protein, 447 aa, unidentified; identical to SEQ ID NO: 5309

SEQ ID NO: 21082 - protein, 424 aa, unidentified
MASMQYVYVLNKHGEPLMPCSPGKARLLLKQQKACVVKRTPFTIKLLYGSAGYKQPVALGIDAGSKHVGLSASTEKRELYREEFTPRNDVVELLSTRRQNRRSRRNRKTRYRAPRFDNRVHSKHKGWLAPSVEVKIQEHITVIKRICRILPITLVRVETAEFDTQRLKAMLKGKPLPVGTDYQLGEMYDEYNVRQYVLKRDNYTCQCCGAHPTEKKPIRLHVHHIESRHVGGNAPNNLITLCVACHKALHEGKITLDKGKKRGKPLRDAAFMGIMRNMLLARLKDELNIPVKQTYGYITKLLREKNKIPKSHVNDARCIAKAPNAKPCDTMLYTRALRHHNRQIHKAKILKGGIRKKNQAPYLVKGFRLWDKVRYNGEECFITGRRSSGYFALKKYDGTVISNSASYKKLMLLEAATNYITERS

SEQ ID NO: 21083 - protein, 443 aa, Anoxybacillus sp.; identical to SEQ ID NO: 4769

SEQ ID NO: 21084 - protein, 340 aa, unidentified
SATAEKEELFACETTLRTDIVDLLSTRLQNRRTRRSRLRYRKPRFNNRGSSKKKGWVAPSVKQRIDSHLNEVNEIHKILPITKIVIEVAQFDTQKMKNHDISGSDYQNGEQLGFWNVREYVLFRDGHKCSHCKGKSKDPVLNVHHLESRKTGGDSPSNLVTLCESCHKAFHKGEIELKKKRGKSLRDAAVMGIMKWKLYEELKSRYDNVSMTFGYITKYNRIKYGIEKSHTSDAFVISRNFNAKRIERQYLKRLVRRHNRQIHKMKILKGGKKKNNQAPFGVFRFRLFDKVLYNNEICFIYGRRKSGNFNIRDFNGENPKDVSYKKLKLIRGKMHPIILK

SEQ ID NO: 21085 - protein, 368 aa, unidentified
LFEADVELRNDISRLLEARYTFRRSRRNRKTRYRKKRFDNRVSSKHKGWLAPSIEHKIQSHFAMVEKLHRILPITKIVVETASFDTQLLKAQLEDKPIPQGTDYQNGELAGWNIREYIFHRDNYTCQWCKGKSKDPILVTHHHAYWKGDHTNKPSSLITLCNTCNDSKYHKKEANRLWGWEPKITNSYKHAAFMGVMRWTFYNRLKEIYPNVSMTYGYITKNTRIENNLPKTHYVDARCISGHPEAKSNGEYFYYKKVRCHNRQLHKANTLKGGIRKRNQAEYIVKGFRLFDRVEYQNNEYFIFGRRTSGFFDIRTLDGQKVNKGSISFKKLKLKETSKTYLIERRMADTGVSLAPLTTEVTSLRQTG

SEQ ID NO: 21086 - protein, 394 aa, unidentified; identical to SEQ ID NO: 7301

SEQ ID NO: 21087 - protein, 421 aa, unidentified
MVFVLSKDKTPLAPTYEAKARKLLEQGKAIVHKIFPFTIRLKEKKTCTKNFDIKFDVGASVTGVAIVDAVKCFFFAEIVHRGKVIKKAMDSRRAIRRSRRARKTRYREARFDNRTRADGWLPPSVKSRADNVINFANKYAKLIPIKKAIVEKVSFDTSSMTNGKKLYGKEYQNGELKDTKLRDFIFKKHNHKCVYCGGDGEEIEHITPRSKGGTNSVQNLTLSCRKCNIEKGNLSLKDFGKKVKKDFSHLEPRKTPKNASIIQSARTYTLKELAKKFEVETSEGWETYANRKEINLPKEHYFDAMCIGNKYKYKILANKVLEVKAQGRGSRQMCRMDRFGFPRTKAKSSKIVKGFQTGDIVKAVVTKGKKIGTYLGKVAVRASGNFNISTDKATVQGINYKYCTTVQKGDGYAYATRTINQ

SEQ ID NO: 21088 - protein, 419 aa, unidentified; identical to SEQ ID NO: 5677

SEQ ID NO: 21089 - protein, 427 aa, unidentified; identical to SEQ ID NO: 14799

SEQ ID NO: 21090 - protein, 535 aa, Streptomyces sp.; identical to SEQ ID NO: 4636

SEQ ID NO: 21091 - protein, 480 aa, unidentified; identical to SEQ ID NO: 2726

SEQ ID NO: 21092 - protein, 427 aa, unidentified; identical to SEQ ID NO: 5062

SEQ ID NO: 21093 - protein, 493 aa, unidentified; identical to SEQ ID NO: 2644

SEQ ID NO: 21094 - protein, 436 aa, unidentified
MTKTLTTQTTQACVLDRQGKPLMPTTRLGKVYRLLKTQKAHIVSYEPFTIQLDYQPDTQVIQPMTLGVDSGAIHSGYSIANEHREYYSAEVIARNDISNRLSDRRMCRQNRRSRKTRYRKPRFNNRKNKKKGWLPPSLEQKVAVQVNEIDHIHRYFPIETIIVETAEFDIQKIKNPDISGIEYQQGTLQGYNIRNYLLEKHGRKCFYCGKAVSDFEVEHMLPKSKGGSNRIDNLTLSCHDCNEKKGTLTAEEFIQQTLPAKKATAKLKQLPNEKRLFKYMAHMNTTRWALYDAIKERYPNVKMTYGYITKYNRIQAGLPKTHHIDAKCITGFSTVPSMSQTVVKVKMRRHNRQLHRATFSKGHVRKAACLPTTVFGFQLYDLVCFNNHRYYIKGRRSSGAFALVSVEGLKNEERMYKKLTLLAHTNAYLTNRYVNA

SEQ ID NO: 21095 - protein, 429 aa, unidentified
MMVYVLDMNGRPLMPTHNGAKVRVLLKQKRAKVISKCPFTIKLLYESTNFTQSLTLGVDTGSKYVGSAVINDVTSEIIYESQTELRDDVKSKMDRRRQFRRVRRNKLRYRPVKFNNRRASKRKNRYTPTLISKFQGHKREIEFIKLILPIKYVILEVGEFDPQLLQDPTLAYRKWGYAKEELYQQENFKQATKARDDYKCQCCGKKNCRLEVHHLLPRSRGGSDKLANLLTLCTDCHSLAHSSEEQLLAFQKKFGKKAKSTLRYATQMNVLRHMLQREYPEAELTYGFHTKEMRRVFGLEKSHMIDACCIASRGVLFKNETSNKYKKKCVPKGNYVRTNTTNGKHVIIPKGKIAGFRRYDKVLYNNKEYFIAGRRSIGKVYLIDIDNNRVQVDRIKRTTGEKYVSKAEIKVSLVKKVASAKTCLCTISK

SEQ ID NO: 21096 - protein, 249 aa, unidentified; identical to SEQ ID NO: 12068

SEQ ID NO: 21097 - protein, 450 aa, unidentified; identical to SEQ ID NO: 2935

SEQ ID NO: 21098 - protein, 424 aa, unidentified; identical to SEQ ID NO: 6692

SEQ ID NO: 21099 - protein, 430 aa, unidentified
MPKVYVLNRHGRPLMPCTPAKARHLLDAGKAKVKHRTPFTIQLLYGSTGYAQEVILGVDAGSKTIGLSASTETEELFSAEVKPRNDVVELMSVRRQFRRARRNRTTRYRKPRFDNRVRSKHKGWLAPSVEVKIQDHITAIRRVCGILPVSKVVVETAEFDLQLLKAIADGKPVPQGEDYQKGEMYGHYNVRQYVLWRDGYTCQCCGAHATQKKEVRLHVHHLESRKVGGDAPDNLVTLCTACHDKLHKGIIMAADIKKRKRRSTRDATFMGIMRMTLLRRLREQLPVPVVETRGYITKATRENLLVLPKSHTNDALAIAHGPQGFRTEYLPNIRQADRLYTIRPVRHHNRQLHKATILKGGVRKANQAEKYICGFRLYDKVLYNGIECFVWGRRTSGSFLLRQLNGEKVKDGVSYKHLKLLERSQSYLVA

SEQ ID NO: 21100 - protein, 442 aa, unidentified; identical to SEQ ID NO: 3234

SEQ ID NO: 21101 - protein, 434 aa, unidentified; identical to SEQ ID NO: 5659
  source 1..434: note = Clostridiaceae bacterium

SEQ ID NO: 21102 - protein, 270 aa, unidentified
LQFYRKEHSIMQYVYVLNKHGEPLMPCSPGKARILLKQQKACVVKRTPFTIKLLYGSAGYKQPITLGVDAGSKHVGLSASTEKRELYSEEFTPRNDVVELLSTRRQNRRSRRNRKTRYRAPRFNNRIHSKHKGWLAPSVEVKIQEHITVIKRICRILPITLVRVETAEFDTQRLKAMLSGKPLPVGTDYQLGEMYDEYNARQYVLRRDNYTCQRCGAHTTKKKTVKLHVHHLESRKTGGNAPSNLITLCVDCHKAFHAGKVKLDGKKRGK

SEQ ID NO: 21103 - protein, 424 aa, unidentified
MVFVLNRSKKPLDMISHAKARILLKNRLAVVHKIYPFTIRLKDNSAVLKDRAYTVKIDPGSRHTGVAITDDKDQVVMLAEVEHRGHLIKKDLDSRRNVRRHRRNRKTRYRPARFLNRTKPKGWIAPSVKSRADNVINFIKKYKKLININKVMIENVSFDVAQMSSDTSLIGTDYQQGPLYDTNLRNFVFSKTNGRCSYCGAKATEIDHIVPRAKGGSNSTFNLTPACRSCNEKKSNLTLKEFGKLVGKDFSKLEPKKLPKDEAIVQSARNYMFQEIAKIIPNTTGYGAWMTKYNRNELGLPKEHYYDALSVGNIQDYKFLTNKVLQISAKGRGSRQMCSMNKYGFPRTSPKGSKSVEGFQSGDMVKAIISNGPKQGVYLGRVAVRANRSFDIRTKSGLVKDIWYKNCRLIQRGDGYLYSYKDRI

SEQ ID NO: 21104 - protein, 396 aa, unidentified
VKRRTPFTIQLTIATGETKQPVSLGVDTGYKHVGLSASTEKAELYASEVELRQDITDLLSARRALRQSRRNRKTRYRAPRFDNRIRTKRKGWLAPSVENRINAHLSRIEAVLRLLPITKITVETASFDMQRLKNPDISGKEYQEGEQLGFWNVREYVLFRDGHVCQHCHGRSKDPVLNVHHLESRRTGSDSPDNLITLCETCHKALHRGEITLKAKRGQSFRAQAFMGIMRREVLNRLKASYPELKVHETYGYLTKHARIANGIVKSHGADAFCIAGNLGAERLGEFFFQKQTRRNNRQIHKLSILKGGIRKRNQAPFEAKGFRLFDKVACQGEEGFIFGRRSSGSFDVRKLDGTRISAGISCKKLRLLEKRRTYLTEIRKEEALPPLPEGRGLRA

SEQ ID NO: 21105 - protein, 403 aa, unidentified
RCRRQRRAKANGTISKKCVKQTTAQNGSVSKRAKDIGVIKRRLPGCEKDVLCIGIKNKETKFTNRTRPEGWLTPTANQLLQTHVNLVKKIQKFLPISDVVLEVNKFAFMRLDNPNIQKWQYQQGPLYKKESLESAVSEMQEHHCLFCKKPIDHYHHVVPQHKNGSNTIGNIVGLCAKHHDLVHKDSAWEKKLAKKSTGLYKKYGALGVLNQVIPTLTNELSSLFPKHSFVTNGKSTYDYRAAHGVSKDHWLDAYCIACSVLPSNVCDSNINNHMPYELKQFRRHDRRVLNNENMNRVYTLNNKAVAINRHKAKDQKTVSLEEFRKEHPDDVCKLKVKEHHPTYRNMNRNFPGSVFLVGKQIHVMQGIASSKDGKATKYNDTSATAIAAGKCKFVAKNTGILFV

SEQ ID NO: 21106 - protein, 292 aa, Parasutterella sp.; identical to SEQ ID NO: 6038

SEQ ID NO: 21107 - protein, 423 aa, unidentified; identical to SEQ ID NO: 3951

SEQ ID NO: 21108 - protein, 442 aa, unidentified
MVTVQQSTHHLPFGRVFIRRNLFMVYVISQDGKPLMPCSNSIARLLLKQSKAKVKKREPFTIKLTYETTNYTQDLTLGVDTGSGTIGTAVSKDNGDIVYMSEVVVRNDITDKMTQRAKYRRNRRNRKTRYRKARWLNRASSIKKDRFSPTMQSKLHSHVREIEYIQSILPVTEMVFETGQFDMQLMKNPSLANPKVRPWGYQKGANYGFENTKAMVLNRDNYTCQCCKGKHKDSKLEVHHIVFRSQGGSDEESNLLTLCHTCHKDLHSGKINPKLSGKVKGNLKYATQMNSIRKQLFRFYPNAIETFGYVTKANRLHLGVDKEHYYDACTIATQGNAFNVKSNLYKKKCVSDGDFQKTKGIRSEQPIVTDKICGFRKFDKVRYFGNDYFIKGRMSTGYAILMDIDGNKIDFSTMPRGYKTPKLSNCKRITARSTVMTQVKVV

SEQ ID NO: 21109 - protein, 515 aa, unidentified
MQYLDFTLVVDKNNKPCVPILNGRAGYLLRNNKAKIINHDPLVIKRIDDYKSDFENRDIFELKIDSGYLNIGFSVSDNYHEYLAGQVELLKGMSDRLTNRNGYRRTRRSRIRYRKNKNVDYKTVHNPTYKNGNEEGWFAPSIQHKIDSHIRLIDKIASWVPVDKVIVEVAKFDIQMIKALADGKEISGKDYQNGEMKGYENAAAYVRDRDKHTCRLCGANKNVVIEVHHIQPRSKGGTDKPSNLISLCHSCHRKVHSNNNDNKYFEKVKSMKLSDTYKDSTYMNMVRWELFERLSGKYDVKVGYGYQTKINRRNAGLRKFHYTDAVCINDYKDVTLTENIYIVDQKRCNDRSMETFSDAKYIDVRDGKEKSGNTLYKERLPNAPSKRVTQKEYINNMRQFRGKKIKPGKRTFVCNSYCLKCGDLIYINSGKHRGNIAEVESMQKLPNGNFKIRFTYKAQTVKYPSISIKPEEYELLKNNLLDKVKIVRTRRGMIWRKYNRLEYEATHADQEGMAV

SEQ ID NO: 21110 - protein, 426 aa, unidentified; identical to SEQ ID NO: 6377

SEQ ID NO: 21111 - protein, 458 aa, unidentified; identical to SEQ ID NO: 3879

SEQ ID NO: 21112 - protein, 387 aa, unidentified
MAVFFNYPKIFVVDAEGKPLLPCHPARARKLLKSGNAVVERGMPFAIRLKYAVPNPVGSLRAKVDDGSKKVGIALVNEHTGEVVFRSVLVQRGDVVRLLTLRRGYRRNRRYRIVRHRSCRNRNRKQATPFPSIRQKKEAICRVLSDLAKVAPISGVDVEIVSAGVKNPSLPGESTREKVLNRDGACVLCGSAKKLQRHHLVPRSKGGSDTPVNQVALCEECHRKLHAGDAHLDRKGKTFAWVTHAAQGKMYLLALLSRFGEVRTCKGWQTKEWRESLNLPKSHVSNAASLFPPSKPLKFFGPEHLIYPLRRRKWEGNPTKTCEERSGLRHWDIVRAVRAGKVVFGCVRSLKARAVTLRTASDSNFEVSYSKAKLLHRPRGLAYVLVW

SEQ ID NO: 21113 - protein, 320 aa, unidentified
RAPRFDNRIRTKRKGWLAPSVENRINAHLSRIKAVLRLLPVTKITVETASFDLQLLKNPDISGKEYQEGEQLGFWNIREYVLCRDGHVCQHCYGRSKDPVLNVHHLESRRTGGDSPGNLITLCETCHKALHRGEITLKAKRGQSFRAEAFMGIMRWEVHNRLRALHPGIEVSNTYGYRTKHARIANGIAKSHCADAFCIAGNLGAERLCEFFFQKQTRRNHRQIHKLSILKGGIRKRNQAPFEVKGFRLFDKVACQGEEGFIFGRRSSGFFDVRKLDGTRISAGISCKKLHLLEKRRTYLTEIRKEEALPPLPEGRGLRA

SEQ ID NO: 21114 - protein, 411 aa, unidentified; identical to SEQ ID NO: 2867

SEQ ID NO: 21115 - protein, 455 aa, unidentified; identical to SEQ ID NO: 12675

SEQ ID NO: 21116 - protein, 396 aa, unidentified; identical to SEQ ID NO: 4508

SEQ ID NO: 21117 - protein, 266 aa, unidentified
MSTVYVLNKDGKPLMPTTRGGHVRHLLKEQKARVVRTKPFTIQLLYETNDVVQPLYLGIDPGRTNIGVAVVKADSTAVFTAHLETRNEEIPKLMQGRKKARRARRTNGRRCRRQRRAKANGTISKKCVKQTTAQNGSASKRAKEIGVIKRHLPGCEKDVLCIGIKNKEAKFSNRTRPEGWLTPTANQLLKTHINLVKKIRKFLPISDVVLEINKFAFMRLDNPNIQKWQYQQGPLYQKASLEEAVSEMQEHHLLQKILAYCLCSVH

SEQ ID NO: 21118 - protein, 442 aa, unidentified
MSTSVFVLDKKHRPLMPCRPARARRLLRAGRARVVKRFPFVIRLVDRTVEQSEVQPVLIKLDPGSRETGAAVVRDDGKKRHHALAFFVIEHRGGAIRDALKARSAFRRRRRSQNFRCRSPRFLNRVKPKGWLPPSLRHRVETTLSFVRRMCRYLPVSGIATELVKFDSQKLQNPEVSGVKYQQGTLFEYEVREYLLEKFGRKCVYCGAEGVLLNIDHVVPRAKGGSNRVSNLVLACVSCNQKKGARSLEDFLKGKPKVLARVRRELKTLLRDAAAVNATRWVLFNELKATGLPVETGSGALTKFNRHAFGVEKEHWLDALCVGRLNGVVTRKGLNVLEIRCMGRGSRQRTRLTKYGFPRGYLMRQKCVHGFATGDMVEANVPKGKKAGLWRGRVAVRVSGSFNIQTPKGVIQGVGWKHCRLISHNDGYGYAWLGHAPHSSPA

SEQ ID NO: 21119 - protein, 462 aa, unidentified
MSVLVIGRNGRALMPTNPRKARLLLKKKTASVVCRHPFTIQLLYKTGCATQEGCIGIDTGSQHIGVGITCGDRVILKDEHALRSSMEKRSLLATRAVMRRGRRYRKVRYRKPKWRHHTKRMYIEKANRRGRHWRKVKTTTQSPRPKGWLPPSLQSKCDHHFRIIDRYLKYLPDPITRNLVIEAGRFDMARMNDPTIHGEMYQRGPMYDAENLRAYIFARDNYQCACCKAKAGTTRKADGTTVKLVAHYILFRSRGATDNPKYIISVCDHCHTTKAHQPGGILYSWMENNKKVARGLRDAVFMNILRKRLFARYPQSAFTYGNITATDRKQLRLPKSHANDAVAISLFGKEASTVKNICQTMHYKQIRKSKRSLHEAIPRKGRKNPNTKAVRNKKNTTQVNGFKLWDSVLADGKKLFICSFTGTSAYLIDKNGCYISQPGKTYKQWPLSKLKRLHPNGNWLMA

SEQ ID NO: 21120 - protein, 536 aa, unidentified
VLRPRYQYPTRWYPSREQGSGNGCLSGEENTDLEQEVSGTLSKGDHSHPGEQDFCVPAITIQGGPAMSVFVVGLNGCRLMPTSERKARLLLKHGKASVYRKVPFTIKLNYKTGSTTQSGYLGIDTGSQHIGVSVVREDGTVLHKEEIGLRDSMSKRKLMQSRASSRRGRRHRKTRYRHPKWRPKAKRVYCEIPDRKGRHWKKKEITFASKRAKGWLPPSLQSKTDHHIWWIKKLQDLLPEGYRLSIELGRFDPARLKDPEIHGELYQKGPQYDYENVRAYVLNRDRYTCQVCGKKGGKLHVHHILYRSHGATDDPQYMATVCSDCHNTENHQQGGILYQWMQKQKKFTRGLRDATFMNILRKRLIEAFPGATFTYGNITKADRERLRLPKSHGNDATAIAIVKTGIMTVKDKEPVIYIQQVRRKKRSLHEETPRKGRKESNRKASRYDKNTKAVTVTKRKNKKKITITGCLFDRVELNGKKGWISGFTDKSCYVKDENDQYIRTSPKYKQVSLSKLKILHHCGNWAIGARQSLGKG

SEQ ID NO: 21121 - protein, 413 aa, unidentified; identical to SEQ ID NO: 5477

SEQ ID NO: 21122 - protein, 428 aa, Oscillatoria sp.; identical to SEQ ID NO: 2282

SEQ ID NO: 21123 - protein, 512 aa, unidentified
MSTVYVLNKDGKPLMPTTRCGHVRRLLKEQKARVVTSKPFIIQLLYETNDVVQPLYLGIDPGRTNIGVAVVRTDGTAVFTAHLETRNKEIPKLMKKRKDSRRARRTNGRRCRRQRRAKANGTISKKCVKQTTAQNGSVSKRAKEIGVIKRHLPGCEKEVLCIGIKNKEAKFSNRTRPEGWLTPTANQLLQTHINLVKKIRKFLPISDVVLEVNKFAFMQLDNPNIQKWQYQQGPLYQKASLEEAVSEMQEHHCLFCKKPIAHYHHVVPQSENGSNTIGNIVGLCTKHHDLVHKDATWQKKLAKKKTGLNKKYGALSVLNQIIPALTKDLSSLFPKHFFATNGKSTYDYRAAHGVSKDHWLDAYCIACSVLANDVCDSNINSHVPYELKQFRRHDRRALHKENMSRVYTLNGKSVATNRHKAIKQTTDSLEEFRQCQPDDVCKLKVKEHHPEYRNPKRNFPGCVFLVGKHTHVMQGTSGSHNGKADGYYDTNGNSYPSGKCKFVAKNKGIVFA

SEQ ID NO: 21124 - protein, 443 aa, unidentified
LTKDENRPSGRTTGLRAEQAEPAGIRKGDTLKVFVLNMRSKPLMPCSPAKARHMLKAGKAVVVRRTPFTIKLTIATGETKQDVTLGVDAGARHVGISATTEKEEVFASEVALRQDITGLLADRLAFRRARRNRKTRYRAPRFNNRVRSKHKGWLAPSVENRIQAHMSRIEAVCRLLPVTKIVIETASFDIQKIRNPEVEGTGYQQGDQLGFWNVREYVLFRDGHICQHCRGRSKDPILNVHHLESRKTGGDAPNNLITLCETCHKAYHAGKIKLKVKRGHSFRAEAFMGIMRWTLLNRMRKAHPSLPVENTYGYLTKHKRIALGLPKTHCADAFCIAGNLKALRRGDFLFQQQTRKHNRQIHKCSILKGGVRKLNQAPFLVKGFRLFDKVRIGGQIGFVFGRRVRGTFNIRRLDKTVIGTDINCKKLSLLETRKTFLTELRKE

SEQ ID NO: 21125 - protein, 421 aa, unidentified
  source 1..421: note = Euryarchaeota archaeon
VYLAQYWLITTPLRTNTPARVGQALSVPVINMHGKPLMPTTPGKARILLKHGKATVVQRAPFTIQLCYLNGKYTQDIKLGIDAGYSTIGFSATTDKRELISGELILRKKISKLIDQKRNYRRTRRSRLWHRKPQFNNRSKPKGWLAPSIQHKLETHLRLIKKLKKILPITKITIEVAKFDQQKMNNPEIKNVGYQQGELQGYEVREYLLEKWVRKCVYCGKNNLPLEIEHIIPKIRGGTNRVSNLTLECHRCNQKKGDKTAAEFGYPDIQKKANQTLKSTVFMNIVRKKVVNTLKCAWTYGHITKHDRIKMKLEKSHINDAFVIAGGTTQSRTIPYMTTQTRRNNRSIQTNRKGYKPSIRKQRYKLQPGDLVKYIKSLFRVKGVFSYGKWVRLISLTKANKIINVNIKKVELVKYGKGIQF

SEQ ID NO: 21126 - protein, 421 aa, unidentified; identical to SEQ ID NO: 4757

SEQ ID NO: 21127 - protein, 218 aa, unidentified
NPVRLHVHHFESRKYGGNAPDNHGTLCDDCHKKFHLGIITDVKLKTRRRQSTRDAAFMGIMRKTLMWRLRTELFIPVAETKGYITKATREKLLVLPKSHTRDALAIAQGRHGFGIKEYAYVEPANHIYTVRPVRHHNRQLHKASILKGGIRKRNQASKYVFGFRLYDKVLYQGKACFVWGRRTRGTFLLRTIDGIKVKDGVSYRNLTLLERSSNYLIA

SEQ ID NO: 21128 - protein, 442 aa, unidentified; identical to SEQ ID NO: 2834

SEQ ID NO: 21129 - protein, 451 aa, Kandleria sp.
  source 1..451: note = isolate UBA3656
MSVCVVAPDKKPLMPTSEYRARKLLKSGKAVIFKYKPFTIMLTRIVSENMQPIEYCCDTGYKHIGVSIKSEKHEYFDCQFDMLQDEKKRHDDRRKMRRARRNRLRYRKPRFDNRTASKKEGWLAPSLRNIRDQHIRIFERFLEVMPIVSATFEMGSFDVHAMHEFEATGTVLKGDDYQKGPRYGMNTLRKAVFYRDNYTCQVCGETADEGAILRVHHIGFETGDHTNRMSNLLTVCTKCHTSANHKPGGKLYDLKPRTKPFNGAAFMNAVRWQMFRTLKSTHPDLEWHMTYGAATQEARRVLHLEKSHANDAYAMGEFHPRRRTPFMHFQKLRRNNRILEKFFDAKYVDARDGKTKKGAELSCGRTARSESRHSEKNLRVFRERKVSKGRRVIRRSHYALRPGDTVVIGREKHRAKGVHNKGTYVVTDAKKSVPVKKVEKIIHAGGYMPVK

SEQ ID NO: 21130 - protein, 322 aa, unidentified
RKPRFDNRVRSKHKGWLAPSVEVKIQEHITSIKRVCRILPVSKVVIETAEFDLQLLKAIEEGKPVPQGEDYQQGEMYGHYNVRQYVLWRDGYTCQCCGAHATKKKEVRLHVHHLESRKVDGDAPDNQVTLCESCHEKLHKGLIAEKDFKKRKRKSTRDATFMGIMRKTLMQRLCSELPIPVIETRGYITKATREKLLVLPKSHTNDALAIAQGKQGFNVGYLPGIVQINKIYTIRPVRHHNRQLHKATILKGGIRKSNQTEKYVFGYCLFDKVQFNGQDCFIWGRRTTGIFTIKTINGKMIKDGISFKKLKPVEKSTGYLIA

SEQ ID NO: 21131 - protein, 418 aa, unidentified; identical to SEQ ID NO: 19622

SEQ ID NO: 21132 - protein, 442 aa, unidentified
MSTTVFVLDKKHRPLMPCRPARARRLLRAGRARVVKRFPFVIRLVDRTVEQSEVQPVLIKLDPGSRETGAAVVRDDGKKRHHALAFFVIKHRGGAIRDALKARSAFRRRRRSQNFRCRSPRFLNRVKPKGWLPPSLRHRVETTLSFVRRMCRYLPVSGIATELVKFDSQKLQNPEVSGVKYQQGTLFEYEVREYLLEKFGRKCVYCGAEGVPLNIDHVVPRAKGGSNRVSNLVLACVSCNQKKGARSLEDFLKGKPEVLARVRRELKTPLRDAAAVNATRWVLFNELKATGLPVETGSGALTKLNRHAFGVEKEHWLDALCVGRLNGAVTRKGLNVLEIRCMGRGSRQRTRLTKYGFPRGYLMRQKCVHGFATGDMVEANVPKGKKAGLWRGRVAVRVSGSFNIQTPKGVIQGVGWKHCRLISHNDGYGYAWLGHAPHSSPA

SEQ ID NO: 21133 - protein, 432 aa, unidentified
MVTVQQSTHHLPFGRVFIRRNLFMVYVISQDGKPLMPCSDPIARLLLKQGKAKVKKREPFTIKLTYETTNHTQGLTLGVDTGSGTIGTAVSKDNGDIVYMSEVVVRNDITDKMTQRAKYRRNRRNRKTRYRKARWLNRASSIKKDRFSPTMQSKLHSHVREIEYIQSILPVTEMVFETGQFDMQLMKNPSLANPKVRPWGYQKGANYGFENTKAMVLNRDNYTCQCCKGKHKDSKLEVHHIVFRSQGGSDEESNLLTLCHTCHKDLHSGKINPKLSGKVKGNLKYATQMNSIRKQLFRFYPNAIETFGYVTKANRLHLGVDKEHYYDACTIATQGNAFNVKSNLYKKKCVSDGDFQKTKGIRSEQPIVTDKICGFRKFDKVRYFGNDYFIKGRMSTGYAILMGSAEHALDVSDTTVLSDFDCSEAGTGTGTQ

SEQ ID NO: 21134 - protein, 408 aa, unidentified
MVYVQDIDGKPMMPTTRHGKVRRLLKANKATVVNLCPFTIRLTYATSGYKQEIVLGVDAGTKHVGLSATTKSKEIYSSEVILRSDIVELLSTRRELRRTRRNRLRYRKPRFGNRVKSKHHGWVAPSVRYRIDAHIRVIDNVCSILPISRVIIEIAQFDTQKIKNPDISGNEYQEGDQLGFWNVREYVLARDGHKCQHCKGKSKDPILNVHHIESRKTGGDSPSNLITLCETCHKEYHKGNIDLKVKRGKSLRDSAVMGIMKWKLYEELKSRYPNVSMTFGYITKYNRIKYGIEKYHISDAFVISKNFNALRLEYHYKVRLVRRHNRQIHKQKVLKGGAKKPNQSPFEVFGFRLFDRVMFEGNYYFIFGRRKSGSFNIRDINGGNQRNVTYKKLKLSIGKRFMIQKEMN

SEQ ID NO: 21135 - protein, 450 aa, unidentified
  REGION 1..450: note = IscB polypeptide
MQKLEKRYNNTPTDAPQIRSNCDSVIKHDCMVGQVLQNTKTFSSDSDVDQLSGKREQDLRVPVLNMRGKPLMPTTPAKARHLLEQGKAKVVSRKPFTIQLKYATGETKQPITLGLDSGYKTIGFSAVTSKTELLSGEVNLRTNISKLLEQRRNYRMTRRGRLWHRQPRFNNRSKPKGWLAPSIQHKLDSHIRLVEKIKKLLPVTEVTVEVAGFDIQKIKNPEIEGTDYQQGEQLGFWNVREYVLHRDNHTCQHCHGKKKDPILQVHHINGKADGATDRPEELLTVCKTCHDDHHTGIDPIPKKKIKNFKPKTFMTAVRWKLVNALECKHTYGYITKHNRIKQGLQKSHINDAFVIAGGTIQDRCKPYIVKQVRRNNRSIQTNRKGFKPSIRRQRYKLQPNDLVRYRGKEYRVKGAFSYGKWIRLVDSAKEIINSSTKNVELICYGKGIFG

SEQ ID NO: 21136 - protein, 413 aa, unidentified; identical to SEQ ID NO: 5965

SEQ ID NO: 21137 - protein, 410 aa, Tissierella sp.; identical to SEQ ID NO: 12019

SEQ ID NO: 21138 - protein, 431 aa, unidentified; identical to SEQ ID NO: 2977

SEQ ID NO: 21139 - protein, 377 aa, unidentified; identical to SEQ ID NO: 6012

SEQ ID NO: 21140 - protein, 415 aa, unidentified; identical to SEQ ID NO: 6534

SEQ ID NO: 21141 - protein, 489 aa, unidentified; identical to SEQ ID NO: 19542

SEQ ID NO: 21142 - protein, 428 aa, Symploca sp.
VSKVFVLDTLQQPLNPIHSGRARMLLSQGKAAVFRQYPFTLILKQEVSKPTVEALRIKIDPGAKTTGVALVNDATGEVVWAGELQHRGFQIRDALTSRRQLRRSRRNRKTRYRKPRFLNRTPCQKWLPPSLMSRVHNILTWVARLQKVCNITDISMELVRFDTQKMRNPEINSVEYQQGTLMGYELREYLLEKWNRQCAYCGAKDTSLEIEHMQPRCKGGSNSVTNLTLSCHKCNQKKGSKDVKTFLKAKPGVLKKVLVNAKKLLADTAAVNATRWELKRQLITTGLPVEVGTGGLTKFNRCQQGLEKTHWLDAACVGASTPEQLITSGVKPLLIAAYGHGTRQQCRTDKFGFPSRYCSRSKFHKGFQTGDIVKAVVTCGKKMGTYVGRVATRATGSFNISTTDGLVQGISHKYCTHIHKKDGYSYAT

SEQ ID NO: 21143 - protein, 427 aa, Nostoc sp.; identical to SEQ ID NO: 2670

SEQ ID NO: 21144 - protein, 419 aa, unidentified; identical to SEQ ID NO: 4131

SEQ ID NO: 21145 - protein, 414 aa, unidentified
  source 1..414: note = Spirochaetales bacterium UBA6840
MVYVHNCFGLPLMPCTEAKAKHLLKAHKAKVVNLTPFTIRLNFVVDDITQPVTLGVDAGYKTIGLSASTENKVLFEGEVKLREDIIALLEGRRSRKTRYRAPRFDNRVRSKNKGWLSPSVENRIGTHLSVIAKVYRLVPVSRIVVEVASFDIQKINNPDIEGEGYQKGEQLGFWNAREYVLWRDGHKCRSCFGKTKDTVLEVHHLVQRKDGGSNRPDNLITLCKTCHDAYHRGEIKLDKPKKGFKGATFMGVMRKTLVKRLRELYGSDMAKVTYGYITKNTRIENNLDKTHYIDARCIANHPTATSSETVYSLLKHRSHNRQIHRLTILKGGVRKNNQCPRKIFGFRLFDTVLYNREICLVHARRASGSFSIRKPNGEKVSGSLSYKKLKLISRSKNIDIWKCNATLTASAKIL

SEQ ID NO: 21146 - protein, 415 aa, unidentified; identical to SEQ ID NO: 6883

SEQ ID NO: 21147 - protein, 408 aa, unidentified; identical to SEQ ID NO: 10453

SEQ ID NO: 21148 - protein, 443 aa, unidentified; identical to SEQ ID NO: 8700

SEQ ID NO: 21149 - protein, 406 aa, Geobacillus sp.; identical to SEQ ID NO: 3747

SEQ ID NO: 21150 - protein, 462 aa, unidentified
MSVLVIGRNGRALMPTNPRKARLLLKKKTASVVCRHPFTIQLLYKTGCATQKGSIGIDTGSQHIGVGITCGDRVILKDEHALRSSMEKRSLLATRAVMRRGRRYRKVRYRKPKWRHHTKRMYFEKANRRGQHWRKVKTTTQSPRSKGWLPPSLQSKCDHHFRIIDRYLKYLPDPITRNLVIETGRFDMARMNDPTIHGEMYQRGPMYDAENLRAYIFARDNYQCACCKAKAGTTRKADGTTVKLVAHHILFRSRGATDNPKYIISVCDHCHTTKAHQPGGILYSWMENNKKVARGLRDATFMNILRKRLFARYPQAAFTYGNITAADRKKLRLPKSHANDAVAISLFGKEASTVKNICQTMHYKQIRKSKRSLHEAIPRKGRKNPNTKAVRNKKNTTQMNGFKLWDSVLANGKKLFICSFTGTSAYLIDKNGCYISQPGKTYKQWPLSKLKRLHPNGNWLMA

SEQ ID NO: 21151 - protein, 518 aa, Anaerostipes sp.; identical to SEQ ID NO: 2751

SEQ ID NO: 21152 - protein, 426 aa, unidentified
MVFVLDKSKKPLNMISHAKARILLKNRLAVVHKIYPFTIRLKDNSCVGRDKTYTVKIDPGSRTTGVAVVDDRDSVVMLAEIEHRGHLIKKDMDSRRATRHKRRIRNTRYRPARFLNRTKPKGWLAPSVKSRADNVINFIKKYKKLLNINKVMIENVNFDTAQMSSDTKLIGIGYQQGPLYDTNLRNFVFSKTNGRCSYCGAKAEEVDHIVPRANGGTNSTYNLTPACKLCNAKKSNLSLKDFGKLVGKDYSHLEPKKLPKDAAIVQIARNYMVKEITKLVSDTTIYDAWLTKYNRGELGLSKQHYYDALSVGETPNSFNFLTNKVLTISAKGRGSRQMCRMNKFGFPRTAPKGSKFVKGFQTGDMVKVVVPSGLKKGGEYLGRVAVRSTGRFDIQTKAKTIEGIGHQYCHIIQRGDGYLYSYSERF

SEQ ID NO: 21153 - protein, 220 aa, unidentified
PCQYCGAHTTAKKAVKLHVHHLESRKVGGNAPSNLITLCVTCHNNLHKGKITLDGKKRGKTLRDAAFMGIMRNTLLTRLRNELNIPVQNTYGYITKLLREQNDIKKSHVNDARCISKHPLAEPCSVCYRTKAIRHHNRQIHKAKILKGGIRKANQAPYIVKGFRLWDKVLYDGQECFISGRRSSGYFALRKLDGTAITNSISFKKLWLLEPATNYLIERM

SEQ ID NO: 21154 - protein, 425 aa, unidentified; identical to SEQ ID NO: 10087

SEQ ID NO: 21155 - protein, 464 aa, unidentified
MRKQKKRRHHMVAVISSSGIPLMPTSNYKVRKLLRCGRAKIHRYQPFTIQLLDRENGETQPMELCMDTGYLHIGLSVKSEKHEYLAYQIDTLDDEKKNHQDQLMYRRTRRNRKRYRKPRFCNRLKSKDWIAPSLKHKLEIHEVWIKKICAVMPVTSITLEMGNFDTQVLKAMQEGRPLPEGKDYQQGERYGIATLREAVFFRDNYTCQCCKRTIKDHAILHVHHIVYRSQGGTNRMSNLATVCERCHTPANHQPGGRLWNWRPKLPAFQGAAYMNTVRWMFCENVKQIYPEMQVQNTYGACTKERRRDLSITKSHVNDAYVMGKFQPKHRSEPELFKKRHRNNRCLEKFYDAKYTDSRTGKKTAGKELSNGRISRNHKKDSENLHPYRQKKLSIGRRSIRKQHYKIQPGDIVIVDQKKQKSSGCHNKGSRVMVAGKSYSIKEITVFKYCGGYLHEPINRKEAAG

SEQ ID NO: 21156 - protein, 522 aa, unidentified; identical to SEQ ID NO: 16031

SEQ ID NO: 21157 - protein, 444 aa, unidentified
  source 1..444: note = Alcaligenaceae bacterium
MAVFVVDRHQAPLMPCSEKRARLLLARGRARVHRLIPFTIRLIDREVAQSELQPLELKIDPGSKTSGLALVRKSESVHAETGEMTATAHVLNLFELIHRGFQISNALSARRQMRRRRRSANLRYRAPRFLNRKNKGKGWLAPSLQHRIDTTLSWVARLRKYAPITGLAQELVRFDMQQLENPEITGVEYQQGELAGYEVREYLLEKWQRKCAYCDASEVPLQIEHIHPKACGGSDRISNLTLACAPCNLRKAAQDASVFLTNDPTRLARTQAQSKRPLRDAAAVNATRWMLFNALKATDLPVRTGSGGLTKFNRARLGMPKTHALDAVCVGQVNHVEQWQKPTLEIKATGRGSYQRTRLTRFGFPRGYLTRQKRIHGFQTGDMIRAIVTKGKKVGEYMGRVAVRASGSFNIQTAEGLVQGISHRYCVLTQRSDGYGYSHRSDSY

SEQ ID NO: 21158 - protein, 604 aa, Streptomyces sp.
LPAKAPSAQHGPLLSAAYTREEVTRSPPARLSSDQPESSRSDGSGRCNPMATFPVGEQTHQAVLPQQPALESVGADTPGSRDETAHGHPATGRDTGREHGRGETGGRGTVARRRHAKSAVPAAQAAETGSGDAPALDQSCRSYAGGTGACRVFVLSRDGQPLMPCHPARARELLGKGRAVVVRQVPFVIRLKDRTLGESEVEGVQLRVDPGSKGTGLVLTDEKKEPHDRSSFVTVRRGLVSIELQHRGDQIRAGMRQRAGYRRRRRRANLRYRAPRSDNRARRSGWLPPSLRHRVDTTFSLADRLCRWAPVTEIHVERVAFDTHSLSAGRLLHGTEHQRGPLAGTTVREHLRATWNAACAYCGVSGVPLNVDHLRPRSRGGSHRISNLVLACAPCNKAKGSKPVGTFLAHRPGRLATVLPQVRAPLDDAAAMNATSWQLTAVPATLGRPVQAWPGRLTKANRLAVGLIKTHTLDALCIGPLDHETGDQIVRFPHYVLTAKATGRGSYARTTPDRYGFRRLLRPRAKQHHGYVTGDLVRAVVTAGKWAGTWTGRVSVRSSGQHRLATASCRFDCSHRNLRLLQRGDGYAYSSRRESAVSTSRKNS

SEQ ID NO: 21159 - protein, 320 aa, unidentified
RAPRFDNRIRTKRKGWLAPSVENRINAHLSRIEAVLRLLPITKITVETASFDMQRLKNPDISGKEYQEGEQLGFWNVREYVLFRDGHVCRHCHGRSKDPVLNVHHLESRRTGSDSPDNLITLCETCHKALHRGEITLKAKRGQSFRAQAFMGIMRREVLNRLKASYPELKVHETYGYLTKHARIANGIVKSHGADAFCIAGNLGAERLGEFFFQKQTRRNNRQIHKLSILKGGIRKRNQAPFEAKGFRLFDKVACQGEEGFIFGRRSSGSFDVRKLDGTRISAGISYKKLRLLEKRRTYLKEIRKEEALPPLPEGRSLRA

SEQ ID NO: 21160 - protein, 488 aa, unidentified
MNTVAVVTNTNKPLMPTSPYRARKLLSSGKAKIVKHRPFTILLVNRSDGDIQEIEYKSDTGYLHVGISVCSEKREFVREQRDLLPDEREKHNDRRKYRRTRRNRKRYRKARFDNRIGKIRKKEKNEHVWLPPSLEHKVDAQVQLFLRLYQVMPVKRAVFEMGQFDPALMKALEKGESAPQGIDYQIGERYQIATRRAAVFTRDRYACVFCGRGIKDHAILHVHHIGFWKQDRSNRLDNLATCCEQCHTSENHRPGGILYGVEPKLESLASATYMNVVRFELLQRLKEAAPDVEFHISYGAKTSVIRKQRSISKSHTNDAYCLGQYFPKLRAEEIGFQKIRRNDRILQKFYDAEYLDSRDGTTKKGKELTNGRISRNHKKDHENLHQYRGKKLSKGRVTIRRGRSSLKPGSLVRFDGEVLTVHGTHRSRRKNKAGHIKVSVNVEFERPSKTGRKSAALSKCQIISQSYNTGWKKIQLRKEEQGKIAAVG

SEQ ID NO: 21161 - protein, 457 aa, unidentified
VWLYQAVYNLGEGFLPSSEERTAFYWLLIYRKEHGIMQYVYVLNKHGEPLMPCSPGKARLLLKQQKACVVKRTPFTIKLLYGSAGYKQPITLGVDAGSKHVGLSASTEKRELYREEFTPRNDVVDLLSTRRQNRRSRRNRKTRYRAPRFDNRVHSKHKGWLAPSVEVKIQEHITVIKRICRILPITLVRVETAEFDTQRLKAMLKGKPLPVGTDYQLGEMYDEYNVRQYVLKRDNYTCQCCGAHPTEKKPVRLHVHHLESRHVGGNAPNNLITLCVACHKALHEGKITLDKGKKRGKPLRDAAFMGIMRNTLLARLKDELNIPVKQTYGYITKLLREKNKIPKSHVNDACCIAKAPNAKPCDTMLYTRALRHHNRQIHKAKILNGGIRKKNQAPYLVKGFRLWDKVRYNGEECFITGRRSSGYFALKKYDGTVISNSASYKKLMLLEAATNYITERS

SEQ ID NO: 21162 - protein, 512 aa, unidentified
MSTVYVLNKDGKPLMPTTRCGHIRYLLKEKKARVVASKPFTIQLLYETNDVVQPLYLGIDPGRTNIGVAAVKTDGTAVFTAHLETRNKEIPKLMQGRKKARRARRTNGRRCRRQRRAKANGTISKKCVKQTTAQNGSVSKRAKEIGVIKRHLPGCEKELLCIGIKNKEAKFSNRTRPEGWLTPTANQLLQTHINLVKKIRKFLPISDVVLEINKFAFMQLDNPNIQKWQYQQGPLYQKASLEEAVSEMQERHCLFCKKPIAHYHHVVPQSENGSNTIDNIVGLCTKHHDLVHKDTTWQKKLAKKKTGLNKKYGALSVLNQIIPALTKELSSLFPKHFFATNGKSTYDYRAAHGVSKDHWLDAYCIACSVLPNDVCDSGINNRVPYELKQFRRHDRRALHKANMSRVYTLNDKAVATNRHKAIKQTTDSLEEFRQNHPDDVYKLKVKEHHPEYRNPKRNFPGCVFLVGKHTHVVQGTSGSHNSKADGYYDTNGNSYSSGKCKFVAKNKGIVFA

SEQ ID NO: 21163 - protein, 281 aa, unidentified
MVYVLDKNGQPLMPTDRHRKVRLMLQSGQAKVIKRCPFTIQLNYDSGHQTQEISLGIDAGSKHIGVSATTKIKVLYEADVELRNDIVDLLSSRRELRRGRRNRKTRYRQAKFNNRRRGNGWLAPSIRQKIGTHLTVVENICKMLPISRIMVETASFDIQKIKNPDIQGAEYQQGDQLGFWNIREYVLFRDNHTCQCCKGKSKDKILNVHHIESRKTGGNAPNNLITLCEICHTGYHKGAIQLPKTVKRGMRFKDAAFMGIYAMGFLRSTKATVRTCWYPSA

SEQ ID NO: 21164 - protein, 424 aa, unidentified; identical to SEQ ID NO: 19651

SEQ ID NO: 21165 - protein, 406 aa, unidentified
RLLLKEKKAIVKRRTPFTIQLTIATGETKQPVSLGVDAGYKHVGLSASTEKAELYASEVELRQDITDLLSARRALRQSRRNRKTRYRAPRFDNRISTKRKGWLAPSVENRINAHLSRIEAVLRLLPVTKITVETASFDMQLLKNPDISGKEYQEGEQLGFGNIREYVLCRDGHVCQHCYGRSKDPVLNVHHLESRRTGGDSPDNLLTLCETCHKALHRGEITLKTKRGQSFRAETFMGIMRWEVLNRLKASHSELKVHNTYGYLTKHARIENGIAKSHGADAFCIAGNLGAERLGEFFFQKQTRRNNRQIHKLSILKGGIRKRNQAPFEVKGFRLFDRVACQGEESFIFGRRSSGFFDVRKLDGTRISAGISYKKLHLLEKRQTYLIEIRKEEAFPPLPEGRGLRA

SEQ ID NO: 21166 - protein, 420 aa, unidentified; identical to SEQ ID NO: 7612

SEQ ID NO: 21167 - protein, 430 aa, unidentified; identical to SEQ ID NO: 7477

SEQ ID NO: 21168 - protein, 412 aa, Sharpea sp.; identical to SEQ ID NO: 6145

SEQ ID NO: 21169 - protein, 430 aa, unidentified
  source 1..430: note = Spirochaetales bacterium UBA4673
MVYVLNIHGQPLMPTTRYGKVRRMLKEKQAKVIKRCPFTIQLLYENPNFVQEVSLGVDAGSKTIGISATTPTSELYAAEVKLRTDVVTNLSSRRECRRSRRNRKTRYRQKRFDNRKVNKQNGWLAPSICNKIVTHLTTVDKITKILPVSEIHVEVASFDIQKIKNPDITGIEYQQGEQLDFWNVREYVLFRDQYTCMCCKGRSKDKILNVHHIESRKTGGDAPNNLITLCETCHNDYHNGTIQLPKTIKRGMSFRDATFMGVMRWAFYNKVKEIYEAKGIPVSLTYGYITKNLRIKNNLPKTHYVDARCISGHSNVEPLGYYFLQKKVRCHNRQIHKLKFMKGHYRKRNKADYEILGFKLFDKVLFQNIECFIFGRRSTGRMDLRKLDGTHINASANYKNLKLLENSKHILTERRTGRFLPAAINRVSTS

SEQ ID NO: 21170 - protein, 413 aa, unidentified
LKVFVLNMRGKPLMPCSPAKARHMLKAGKAVVVRRTPFTIKLTIATGETKQDVTLGVDAGARHVGISATTEKEEVFASEVALRQDITGLLADRLAFRRARRNRKTRYRAPRFNNRVRSKHKGWLAPSVENRIQAHISRIEAVCRLLPVTKIVIETASFDIQKIRNPEVEGTGYQQGDQLGFWNVREYVLFRDGHICQHCRGRSKDPILNVHHLESRKTGGDAPNNLITLCETCHKAYHAGKIKLKVKRGQSFRAEAFMGIMRWTLLDRVRKTHPKLPVENTYGYLTKHKRIALGLPKTHCADAFCIAGNLKALRRGDFLFQQQTRKHNRQIHKCSILKGGVRKLNQAPFLVKGFRLFDKVRIGGQIGFVFGRRVRGTFNIRRLDKTVIGTDINCKKLSLLETRKTFLTELRKE

SEQ ID NO: 21171 - protein, 330 aa, unidentified
VVFKGTIEQRQDVKHLMDVRRGHRRYHRYHKRYRQARFNNRSSSKRTCRLAPSIKQKKDAILRVLYQLNKWVNIQEYHLEDVCIDIRALTDDYKPYRWQYQKSNRLDENLRKATILRDECRCQECGKSNCVLEVHHIRARKYGGADTIGNLITLCSGCHQKTEGRERDFEDRYFNMIKSKPKRFDYAMHVMQGKTYLREKISELGSLHLTNGGETANKRIEWNMEKSHGNDAICVTDCIPDNCDVKEWIIKPMRRKSKAKTNNLLGIRHRDLVSYTYKNGETHTGYVTALYPEQLVLNFQSKTKHCKKVNARKCRLLWKFNKIYWLEQCV

SEQ ID NO: 21172 - protein, 429 aa, Parasutterella sp.; identical to SEQ ID NO: 4241

SEQ ID NO: 21173 - protein, 466 aa, unidentified
LSIKPLINIGEGVIYSSICTGLLLQTYQKRKEVPCMVYVLDINGQPLMPTTRHGKVRRLLNSHLAKVVKRCPFTIQLLYQSTKEIQPVSLGVDAGSKHIGMAATTEKKVVYQEELSPRNDVVKLLSLRRASRSSRRSRKTRYRKPKFNNRVHSKHKGWLAPSVEVKIQEHITAIKRICQILPISEIQVETAEFDIQRLKAMKEWKPLPVGTDYQLGEQYDFYNTRQYVLHRDGYTCQCCGTHDNNIKLHVHHIESRQTGGDAPSNLITLCEHCHKALHKGKLELPKGKKRGKTYRDATFMGIMRKTLLERLRKEVDVPVSGTYGYITKYLREKTDLEKSHINDAICISKYPYAKPLDTYYLTKVVRNHNRQIHKSNFSKGGIRKRNQAPYLIKGFRLFDKVLYQGKEYFIFGRRATGYFDIRTLDGTKVNKGSISYKKLRIQDTAKAYLKEARAIPHMNKFTCVLA

SEQ ID NO: 21174 - protein, 420 aa, unidentified; identical to SEQ ID NO: 5136

SEQ ID NO: 21175 - protein, 507 aa, unidentified
MSEYIYVIGMDGDPQMPTKRKRHVEKLLQTGRARVFRQVPYTIQLTYKNQPVLQPVTIAEDPGRSNIGMAVVSLSGELLSAAVVQTRNKEIVKLMEKRKQHRRASRNGERKARQRLAKKCHTMIKTGFLMRKLPMYGKDKRVRCNVIKNTEAKFCNRKREDGWLTPSAEHLVRTHINLIHKMQKFLPITDVAIEINRFAFLSLEDPSISGVDFQNGPLKGYDDLNAAVEDLQDGHCLMCNSPIEHRHHIVPRNMQGSNTIGNIAGLCCKCHERVHKDARFEDRLKKKKAGLDKRYAAVSALNQAIPFICKRLEQEFGKEHVHYCSGRDTAMARRSFGYHKTKEEQLHVVDAWCIAVLSLRQIPEKAPEFDHVHEILQFRRQDRSRIKAQTSRAYYHEGKKIAKNHKKAEGQREDSLQEWRKRQAERYGEEQTRKMISQLEVKESIRRYNRLDRLMPGAVFYYQGVRYVMRGQHSNGQYLQAVGMGDKDFPAKKCKIVIHNQGLVFVS

SEQ ID NO: 21176 - protein, 430 aa, unidentified
  source 1..430: note = Spirochaetales bacterium UBA1631
MVYVFNIHGQPLMPTTRYGKVRRMLKEKQAKVIKRCPFTIQLLYENPNFVQEVSLGVDAGSKTIGISATTPTSELYAAEVKLRTDVVTNLSSRHECRRSRRNRKTRYRQKRFDNRKVNKQNGWLAPSICNKIVTHLTTVDKITKILPVSEIHVEVASFDIQKIKNPDITGIEYQQGEQLDFWNVREYVLFRDQYTCMCCKGRSKDKILNVHHIESRKTGGDAPNNLITLCETCHNDYHNGTIQLPKTIKRGMSFRDATFMGVMRWAFYNKVKEIYEAKGIPVSLTYGYITKNLRIKNNLPKTHYVDARCISGHSNVEPLGYYFLQKKVRCHNRQIHKLKFMKGHYRKRNKADYEILGFKLFDKVLFQNIECFIFGRRSTGRMDLRKLDGTHINASANYKNLKLLENSKHILTERRTGRFLPVASNRVSTS

SEQ ID NO: 21177 - protein, 424 aa, Moorena sp.; identical to SEQ ID NO: 19896

SEQ ID NO: 21178 - protein, 502 aa, unidentified; identical to SEQ ID NO: 6341

SEQ ID NO: 21179 - protein, 386 aa, unidentified; identical to SEQ ID NO: 6902

SEQ ID NO: 21180 - protein, 470 aa, unidentified; identical to SEQ ID NO: 2825

SEQ ID NO: 21181 - protein, 421 aa, unidentified
MRGRPLMPCSPAKARHLLKAGKAVVRRRTPFTIQLRIATGETKQSVTLGVDAGAKHVGLSSATEKEEVFAPEVELRQDITGLLAARLSLRRERRQRKTRYRAPRFLNRVRSKHNGWLPPSVENRIQAHLSRIDAICGLLPVTKIVIETASFDIQKIKHPDVEGTDYQQGDQLGFWNVREYVLFRDGHVCQHCHGHAKDKILNVHHLESRQTGGDAPNNLITLCERCHKACHAGKIKLKVKRGQSFREEAFIGIMRWTLLDRVRKAHPGLPVENTYGYLTKNTRITLGLPKAHCVDAYCIAGNLKAVRRGVYLHQRQVRKHNRQIHKCTVLSKTLKDGTKIGYRKLNQTPHLVKNFRLFDKVRCLGQTGFIFGRRSSGYFDVRRLDGVKLSSGISYRKLTLLEKRSTYLTELRKEDGASSPV

SEQ ID NO: 21182 - protein, 473 aa, unidentified; identical to SEQ ID NO: 9549

SEQ ID NO: 21183 - protein, 512 aa, unidentified; identical to SEQ ID NO: 5811

SEQ ID NO: 21184 - protein, 477 aa, Lactobacillus sp.; identical to SEQ ID NO: 15275

SEQ ID NO: 21185 - protein, 421 aa, unidentified; identical to SEQ ID NO: 2610

SEQ ID NO: 21186 - protein, 518 aa, unidentified
MKEVANMSTVYVLNKDGKPLMPTTRGGHVRHLLKEQKARVVRTKPFTIQLLYGTDDVVQPLYLGIDPGRTNIGVAVVRTNGTVVFTAHLETRNKEIPKLMKKRKESRRARRTNGRRCRRQRRAKTNGTISKKCVKQDTAQSKNLSKCAKEIGVIKRHLPGCQKEILCIGIKNKEAKFNNRTRPGEWLTPTANQLLQTHINLVKKIQKFLPISDVVLEVNKFAFMQLDNPNIQKWQYQQGPLYQKGSLENAVSEMQEHHCLFCEKPIDHYHHVVPKSENGSNTIDNIVGLCAEHHNLVHKDAAWQKKLAKEKVGLNKKYGALSVLNQIIPALTKKLSVLFPRHFFATTGKSTHDYREAHGVSKDHWLDAYCIACSVLPSKVCDSNINNHVPYELKQFRRHDRRVLHKANMSRVYTLNGKTVATNRHKAIKQTTDSLKEFRQSHPDDVYKLKVKEHHPTYRNMNRNYPGSVFLVDGQVHVMQGVSGSHNGKADGYYDTNSNAYPYYKCKFVAKNEGIIFA

SEQ ID NO: 21187 - protein, 239 aa, unidentified
MPNKVYVINKHGRPLMPCSPAKARHLLDAGKAKVKKRTPFTIQLLFGSTGYTQEVILGVDAGSKTIGLSASAETKELFSAEVKPRNDVVDLLSTRREFRRARRNRKTRYRKPRFDNRVRSKRKGWLAPSVEVKIQEHITAIRRVCGILPVSKVVVETAEFDLQLLKAIADGKPVPQGEGYQKGEMYGHYNVRQYVLWRDNYTCQCCGTHPSKKKEVRLHVHHLESRKVGGDAPDNQVTL

SEQ ID NO: 21188 - protein, 426 aa, unidentified
MVFVLDANKKPLSPCHEAVARKLLKQGKAAIFRRYPFTIILKKAVEDTDNKQEYRLKIDYGSKHTGLAILQNNNVIWLGQIDHRTDIKKKLDARRMYRHNRRNRKTRYRKPRFLNRRKIEGWIPPSLESRINNIKTWVNRLQKLVSLTHISYENVKFDTQLMRNPEISGIEYQQGTLQGYEVKEYLLEKFGRKCCYCGKENTPLEVEHMIPKSRGGTDRIDNLCLACRECNQKKDNMTAEEFGYPEIQRQIKQTLKDTSVVNSTRWKVYNVLMQTGLPVECGTGALTKMNRIKLGLPKEHYFDACCVGQSTPDKLYFKTKNVLYIKAKGRGSHCRTNVDSHGFPRGYLARRKYFFGFQTGDMVKAVIPKGKYKGIWYGEVACRKRGDFDIKNKDGQRVVQSANYKYFSIIQRFNGYSYINFYVESL

SEQ ID NO: 21189 - protein, 279 aa, unidentified; identical to SEQ ID NO: 5082

SEQ ID NO: 21190 - protein, 512 aa, unidentified; identical to SEQ ID NO: 11362

SEQ ID NO: 21191 - protein, 452 aa, unidentified
MTSLYIIVEVTITGASPEEVFMTTYNSVFVLDTTKKPLTPCQPARARALLRDGKAAVWRTVPFTIILKVAMPDAIVKPISCKIDPGSKQTGLALVDSDGRVVFAAVLEHRGNAIKAVLESRRSIRRGRRARNTRYRQARFLNRIRPEGWLPPSLQHRVETTLTWVNRFRRLCGIVEIAVERVKFDMQLMRNPEISGVEYQQGTLLGFTVREYLLEKWGRKCAYCAVENVPMQIEHIHPKANGGSNAVSNLALACEPCNKKKGTLDIKVFLKNKPELLKKVVAQAKRSLSDAAAMNATRNKLFVELLNTGLPVETGTGAQTKFNRTRLDYPKEHWIDAACVGESGATVTLNPELKPLLIKATGHGTRQMCTTDKFGFPRRAAKGGKAVNSVSTGDYARIVQPKGKYIGSYVGRISSINTTTNFVTMKVFGKTISFNSKLVTIIQKADGYAYVH

SEQ ID NO: 21192 - protein, 408 aa, unidentified
ICEDVGYNYIGISVKSQSHEYVSAQYDTLQDEKSCHDACRRMRRTRRNRLRYRQKRFDNRKRDKGWLAPSLKHKKELNVNVIKMYCEVVPITHATVEVGSFDTMLVKAIEEGKATPEGADYQKGPRYNLATLREAVFYRDNYTCQVCGREASEGAILHVHHMFYWKGRHDNSLSELITVCEKCHTPANHQKGGKLYGFGEDIKFANLSGAAFMNTVRWQIVNELYAAFGKPFVTFTYGAMTKEKRIALHLEKSHNNDAYAMGEFHPNCRCTFEHYEKVRRNNRILEKFYDSRYIDIRTGEIATGKELFNGRINRSHKKDSENLHKYRGKRIRKGYRALRRKKVALNPGDLVSLNGEILTVHGTHTKKNGSVNVEFKTPSKSGKKSTSLKKLKIIKTISPMRSAWDKVS

SEQ ID NO: 21193 - protein, 326 aa, unidentified
MPCHPARARKFLKKGKAAVYRRYPFTMTRRVGGDLQPIEVKFDPGSRTTGIALVGHFDRGKEVIWAGNLNHRGAQVKKDLNSRRAIRRSRRNRKTRYRQARFLNRLRPKCWLPPSLRSRVDNVKNWMHKLALLAPLTQIAVETVRFDTQKLQKPEIEGIEYQQGELAGYELREYLLEKWDRQCAYCGAKNVPLEVEHIQARSKGGSDRVSNLTLACTPCNQEKGNKDIKDFLKRKKKRLKKIQAQSKAPLKDAAAVNATRYATGNVLKSFGLPITLESGGRTKFNRIKLGYSKDHWIDAACVGESGSHVVIPKAITPLIISAKGRD

SEQ ID NO: 21194 - protein, 493 aa, unidentified; identical to SEQ ID NO: 3781

SEQ ID NO: 21195 - protein, 499 aa, unidentified; identical to SEQ ID NO: 3817

SEQ ID NO: 21196 - protein, 415 aa, unidentified; identical to SEQ ID NO: 3018

SEQ ID NO: 21197 - protein, 473 aa, unidentified
VSLEERENYMKRMNDPNNQQTVPVLDNAGRPLMPTKPSRARRWMRDGKADKCWVKGVFCVQILDVHADDPEVEVNGVQLNIDPGAKATGMAVVSDGGQGRKAHALIELRHRGSRVKKKMDRRHAFRRGRRSRLRNRQPRFDNRTRPDGWLPPSMLTRLANTETWIRRLVAIFPINFARVETARFDTQLMQDAEIGGKEYQQGDLLGWQLRSYVFHRDGRKCAYCGDTKAERYETDHIVPRSRGGTNRVSNLVVSCQDCNIAKGNQPVEEFLRHKPARLTKVRGVMRHMLADASQMNIIVPALLRRLEAIDMPVSTHDAYTTSWTRRRLGVPKTHVNDALCIGAPDALGRLPERKTVIRSTGRGDRQMLRPSDRHGNPRGQGYRDYCALPRQRQGYTRCPGHRERRKQLRSIASGDLVRLTHRRHGVLQRYATLDKRKNRVGIQHESRQVSVMATDAVLLARNHGYRVSTESNE

SEQ ID NO: 21198 - protein, 428 aa, unidentified; identical to SEQ ID NO: 8980

SEQ ID NO: 21199 - protein, 443 aa, Anoxybacillus sp.; identical to SEQ ID NO: 2800

SEQ ID NO: 21200 - protein, 420 aa, unidentified
MQYVYVLSKHGEPMMPCSPGKARLLLKQQKACVVRRTPFTIKLLYGSAGYKQPITLGVDAGSKHVGLSASTEKRELYREEFAPRNDVVELLSTRRQNRRSRRNRKTRYRAPRFDNRVHSKHKGWLAPSVEVKIQEHITIIKRICKILPISLVRVETAEFDTQRLKAMLAGKPLPVGTDYQLGEMYDEYNVRQYVLKRDNYTCQCCGAHTTAKKLVKLHVHHLESRKTGGNAPSNLITLCTTCHKNLHKGKVTLDGKERGKPLRDAAFMGIMRKTLMARLKKELPIPVQGTYGYITKMRREQNDIKKSHTNDARCISKHPLAEPCSVCYRTKAIRHHNRQTHKANFSKKGIRKRSQMPYLVEGYRLWDKVLYKEQEYFVSGRRSSGSFTLKKLDGTSVSKGVTFKKLRLLEPATNYLIERM

SEQ ID NO: 21201 - protein, 470 aa, unidentified; identical to SEQ ID NO: 5320

SEQ ID NO: 21202 - protein, 408 aa, unidentified; identical to SEQ ID NO: 11282

SEQ ID NO: 21203 - protein, 408 aa, unidentified
MVYVQDINGKPMMPTTRHGKVRRLLKDKKAVVVNLCPFTIKLMYVTSDYKQEIVLGVDAGTKHVGLSATTKSKELYSSEVILRNDIVDLLSTRRELRRSRRNRLRYRKPRFDNRIKSKRPGWVAPSVKYKVDAHIRVIDNVCSILPISRIVIEVAQFDTQKINNPNISGKEYQEGDQLGFWNVREYVLARDGHKCQHCKGKSKDPVLNVHHIESRKTGGDSPSNLITLCETCHKEYHKGNIDLKIKRGSSLRDAAVMGIMKWRLYEELKSKYDNISMTFGYVTKYNRIKHGIEKSHVFDAFVISKNFDAIRLGYYYKVRLVRRHNRQIHKQKIPKGGIKRPNQSPFEVFGFRLFDRVMFENSYYFIFARRKTGSFNIRDIDGKNQRDITYKKLKLSRCKRFMVQKEMD

SEQ ID NO: 21204 - protein, 427 aa, Desulfobacter sp.
LNVFVLDTNKKPQNPVHPAKARLLLSEEKAAVFRQYPFTIILKEEIGVNPQALRVKIDPGSKTSGIAVTDDATGEIVFAMQLEHRGQQIKNDLESRRAIRRSRRNRKTRYRKPRFENRIRPEGWLAPSLKSRVHNIETWVNRLCRFSNIQAISMELVRFDMQKILNPEISGVEYQQGALSGYEVREYLLEKWGRTCAYCGKTNLPLEIEHILPKSKGGSNRVSNLTLACTECNQKKGNRPIDIFLSKRPELLKRIQARAKAPLKDAAAVNSTRWDLFRTLKETGLPVEIGSGGLTKFNRTIRGLSKTHWLDAACVGKSTPEKLFQTDKAVLIVKANGHGSRQMCRVNTFGFPRTKAKSRKKKVNGFQTGDIAKAIVTSGKKVGTYIGRVAVRKSGFFNIKTRETTIQGINWKYCHMLHMSDGYSYNI

SEQ ID NO: 21205 - protein, 421 aa, unidentified; identical to SEQ ID NO: 2846

SEQ ID NO: 21206 - protein, 420 aa, Petrotoga sp.; identical to SEQ ID NO: 11467

SEQ ID NO: 21207 - protein, 470 aa, unidentified
MSVFVVGLNGCRLMPTSEREARLLLKHGKASVYRKVPFTIKLNYKTGSTTQPGYLGIDTGSQHIGVSVVREDGTVLHKEEIGLRDSMSKRKLMQSRASSRRGRRHRKTRYRHPKWRLKAKRVYYETPDRKGRHWKKQKITFASKRPQGWLPPSLQSKTDHHIQWIKKLQDLLPDGYRLSIELGRFDPARMKDTEIHGDLYQKGPQYDYENVRAYVLDRDRYTCQVCGKKGGKLHIHHILYRSHGATDNPQYMATICSDCHSTENHQPGGILYQWMQEQKKFTRGLRDATFMNILRKRLMKAFPKATFTYGNITKADREKLKIPKSHGNDATAIAIVKTGIMTVKDNEPVIYIQQVRRKKRSLHEETPRKGRKEPNRKASRYNKNTKAVTVTKRKNKKRISITGCLFDRVELNGKKGWISGFTDKSCYIKDENDQYIRISPKYKQVSLSKLKILHHCGNWVIGARRSLGKG

SEQ ID NO: 21208 - protein, 443 aa, unidentified
LTKDENRPSGRTTGLRAEQAEPAGIRKGDTLKVFVLNMRSKPLMPCSPAKARHMLKAGKAVVVRRTPFTIKLTIATGETKQDVTLGVDAGARHVGISATTEKEEVFASEVALRQDITGLLADRLAFRRARRNRKTRYRAPRFNNRVRSKHKGWLAPSVENRIQAHMSRIEAVCRLLPVTKIVIETASFDIQKIRNPEVEGTGYQQGDQLGFWNVREYVLFRDGHVCQHCHGRSRDKILNVHHLESRKTGGDAPNNLITLCETCHKAYHAGKIKLKVKRGQSFRAEAFMGIMRWTLLDRVRKTHPKLPVENTYGYLTKHKRIALGLPKTHCADAFCIAGNLKALRRGDFLFQQQTRKHNRQIHKCSILKGGVRKLNQAPFLVKGFRLFDKVRIGGQIGFVFGRRVRGTFNIRRLDKTVIGTDINCKKLSLLETRKTFLTELRKE

SEQ ID NO: 21209 - protein, 506 aa, unidentified
MVAVLSNVGKPMMPTIEYKARKLIEKGRTIPYQYKPMFTIMILDRSGGYTQPIELKEDTGYEHIGISVCSQKHEYERKEVITLLDEPEKHHDALVYRRTRRNRLGYRPPRFDNRKRKNNWIPPSLQHKIDIHLYWFNQYTEVLPITDVVFEIGTFDTQRLNAIEKGEKRPYGDDYQKGEQADFYTLRDAVFTRDDYTCIVCGKDIQDGAVLRTHHIGYRYGDRSNRMSNLVTVCDHCHTTKNHQEGGALYNLKSPTKKKANAAFMNVVRQRIIDGAKKSHPEINISSAFGSETKMSRKNLQIEKSHTNDAYAMGAFHPKHRCKEILYQKIRRNNRILSRFYDAKYIDRRDGSTKTGKQLSSGRTNRNHKLDSENFMVCRGKKIQKGRTATRQQSYEFKTKDIVFYQGKRYVVKGTNNKGQNVQLYLNITADLKDLTIKTKNKRKTADLNCIEIGDKVFTEFHGKKKVFTVKNIDSITNQVSLQVDLSTKPSELKLVKYNNGYKQIK

SEQ ID NO: 21210 - protein, 515 aa, unidentified; identical to SEQ ID NO: 17815

SEQ ID NO: 21211 - protein, 411 aa, unidentified; identical to SEQ ID NO: 9890

SEQ ID NO: 21212 - protein, 374 aa, unidentified; identical to SEQ ID NO: 12633

SEQ ID NO: 21213 - protein, 421 aa, unidentified; identical to SEQ ID NO: 4235

SEQ ID NO: 21214 - protein, 406 aa, unidentified
LLDAGKAKIKKRTPFTIQLVYGSSGYTQEVILGVDAGSKTIGMSVSTTKEELLSAEVKPRNDVVDLQSTRREFRRARRNRKTRYRKPRFDNRVRSKHKGWLAPSVEVKIQEHITSIKRVCRILPVSEVVIETAEFDLQLLKAIEEGKPVPQGEDYQKGEMCGHYNVRQYVLWRDGYTCQCCGAHATKKKEVWLHVHHLESRKVGGNAPDNQVTLCESCHEKLHKGLITEKDFKKRKRRSTRDATFMGIMRKTLMQRLCSELPIPVIETRGYITKATREKLLVLPKSHINDALAIAQGKQGFNVGYLPGILQIDKIYTICPVRHHNRQLHKATILKGGIRKPNQAEKYVFGYRLFDKVQFNGQDCFIWRRRTTGIFTIKTINGKMIKDGISFKKLKLLEKSTSYLIA

SEQ ID NO: 21215 - protein, 427 aa, unidentified
MSKVFVLDTKKRPLDPIHSAQTRQLLRNKKAAIFRQFPFTIILKKSRPDSPVSSLRLKIDPGAKFTGMALVNDSNGEVVFAAELKHRGFAIRDALTSRRQLRRSRRARKTRYRQPRFLNRTRPEGWLAPSLQSRVENIKTWVERLRKLSPIQAISQELVRFDMQLMVNPDIQGKEYQQGTLAGYETRQFLLEKWGRQCAYCGVKDVPFQVEHIHPRVKGGSNSITNLTLSCEKCNTKKGTKDIKDFLKKDPLRLEKILKQAKRPLADAAAVNTTRTALLKVLKATGLPVETGSGGLTKFNRSEQNLEKTHWIDAACVGQSTPILNIKGVKLLLITANGHGSRQSCRTDKYGFPSRHVPREKIHFGFQTGDIAKAVVTAGKKIGTYVGKVAIRSTGSFNISTKNGLIQGISHKFCKRIHAKDGYSYAV

SEQ ID NO: 21216 - protein, 384 aa, unidentified
MLAYVLNKHGKPLMPCNSRKARLLLKTGNAKVVRIKPFTIRMVHGSSGYTQTVNLGVDAGSKVVGISATTDKKELYSSECKLRTDVTDNLSTRRAFRRARRNRNTRYRPPRFLNRIKSKKKGWLAPTITQKINTHEQLIKQVHNILPARPAGGPISKIIVEVASFDIQKIKNPEISGTEYQQGEQLDFWNVREYVLFRDNHSCQYCKGKSKDKILNVHHIESRKTGGNAPNNLITLCETCHNKHHAKQIKLKVKRGASFRDAAFMTIMRWAFYDRLKEKYSNVSMTYGYLTKNTRISNKLEKSHAIDARCISGNPTAKPSKNAYTQKAIRTKIGNCTRQQSTRAVQENQTRQPSMFLATSFLIMCDTKSRNVLFSAEEQADILI

SEQ ID NO: 21217 - protein, 406 aa, unidentified; identical to SEQ ID NO: 6079

SEQ ID NO: 21218 - protein, 315 aa, unidentified
LRVFILNKRGKPLMPCSPAKARLLLKEKKAIVVRRTPFTIQLTIATGESKQPVSLGVDAGYKHVGLSASTEKAELYASEVELRQDITDLLSARRALRQSRRNRKTRYRAPRFDNRIRTKRKGWLAPSVENRINAHLSRIETVIRLLPVTKISVETTSFDMQLLKNSDIAGKEYQESEQLGFWNVREYVLFRDGHVCQHCHGRSKDPVLNVHHLESRRTGGDSPGNLITLCETCHKELHRGEITLKAKRGQSFRAETFMGIMRWEVLDRLKASHPKLEVQNTYGYRTKHARIVNGIAKSHCADAFCIAGNLGAERL

SEQ ID NO: 21219 - protein, 447 aa, unidentified
  source 1..447: note = Clostridia sp.
VAGIKTSLNSPDASLTARGHAGQNLRVSVVYVLNKRGKPLMPCSPGKAKVLLKESKAKVAKRTPFTIQLTTATGETRQLITLGVDSGYSSLGLSAVSQDKELYRAQVRLREDLVKLNSERKGYRRARRHRKTWYRSPRFLNRKKPEGWLAPSIQHKLDSHIKLINKVKEILPISKISIEVASFDIQKIKNPDIDGKGYQSGKQAGFWNVREYVFHRDNHKCQHCKGKSKSSVLEIHHLKSRQTGGDRPENLITLCSTCHDKTSRGALELKAKPSKGFKAETFMSTVRWKLINKLRELGNVVTHTYGYITKQKRRELKLPKSHTSDAFVIADGTTQKRTTSEDFIKQVRKCNRKLFKGDRSHIRNTTERFVCGFQRFDKVLCNGVECFIFGRRKTGYFDLRKLDGTNIHSSAKHTKLTLLESAKTLLTERKPAFLPMPEGRGFRAGGF

SEQ ID NO: 21220 - protein, 445 aa, Allochromatium sp.
MFECEYMSVFVLNKQKRPLMPCSEKRARLLLERGRAVVVRLVPFTIRLKDRIGGVLQPLRLKLDPGSKTTGIALVREVVRRDESVVWLAELTHRGYQISEALRARSAMRRRRRSANLRYRAPRFLNRTKPKGWLAPSLRHRVETTINWVKRLRRLAPITEITQELVRFDLQAMQHPEISGIEYQQGELAGYEVREYLLEKWQRTCAYCGAQQVPLQIEHIRPKSAGGSNRLSNLTLACAPCNHKKGAQSIEAFLKHKLELLKQIQAQAQAPLKDAAAVNTTRWALFNALKATGLQVKTGSGGQTKYNRQRLGIPKTHALDAACVGKLDALHNWQIPTLAIKAMGRGSYQRTRLNRFGFPRGHLMRHKRIHGFQTGDRVIAHIPSGKKAGVHVGRVAVRTSGSFNIQTATGVIQGIAHRHCSVLQRADGYGYSFNLTQPEEARLAA

SEQ ID NO: 21221 - protein, 419 aa, unidentified
MVYVISQDSKPLMPCSNVIARLLLKQGKAKVKRRESFTIKLTCETTNYTQDLTLGVDTGSGTIGTAVSKNNGDIVYMAEVVVRNDITDKMTQRAKYRRNRRNRKTRYRKARWLNRANSIRNDRFSPTMQSKLHSHIKEIEYIKSILPVTEMVFETGQFDTHLMKNPSLINPKVKHWGYQKGTNYGFENTKAFVLNRDNYTCQYCKGKHKDSKLEIHHIVFRSQGGSDEESNLITLCHTCHKDLHSGKINTKLSGKIKGNLKYATQMNSIRKQLFRLYPNAIETFGYVTKANRLHLGVDKEHYYDACTIATQGNAFNVKSNLYKKKCVSDGDFQQTKGIRSEQPIVTDKICGFRKYDKVKYFGREYFIKGRMSTGYAILMNINGEKADFSYLPRGFKTPKLSNCKRITARTSQMVQAVAI

SEQ ID NO: 21222 - protein, 466 aa, unidentified; identical to SEQ ID NO: 2459

SEQ ID NO: 21223 - protein, 464 aa, unidentified; identical to SEQ ID NO: 6330

SEQ ID NO: 21224 - protein, 416 aa, unidentified
MVYVLDKNGQTLMPTDRHRKVRLMLQSGQAKVIKRCPFTIQLNYDSGHQTQEISLGIDAGSKHIGVSTTTKIKVLYEVDVELRNDIVDLLSSRRELRRGRRNRKTRYRQAKFNNRRRGNGWLAPSIRQKIGTHLTVVENICKMLPISRIMVETASFDIQKIKNPDIQGAEYQQGDQLEFWNVREYVLFRDGHTCQCCKGKSKDKILNVHHIESRKTGGNAPNNLITLCETCHTGYHKGTVQLPKAIKRGMRFKDAAFMGIMRWAFYEALKQQYEPVGTPVHNTYGYITKHTRIAYNLPKEHYVDARCISGNPEASSNGEYYYQKKVRCHNRQIHKLTVLKGGIRKQNQATYLVKGYRLFDKVSYQGKGYFVFGRRQSGFFDIRTLSGEKVNKGSLSCKKLKFIATRTYYLTERRAV

SEQ ID NO: 21225 - protein, 459 aa, unidentified; identical to SEQ ID NO: 3944

SEQ ID NO: 21226 - protein, 440 aa, unidentified; identical to SEQ ID NO: 9130

SEQ ID NO: 21227 - protein, 442 aa, unidentified; identical to SEQ ID NO: 4522

SEQ ID NO: 21228 - protein, 431 aa, unidentified; identical to SEQ ID NO: 4306

SEQ ID NO: 21229 - protein, 419 aa, unidentified
MVYVISQDGKPLMPCSNPIARLLLKQGKAKAKCREPFTIKLIYETTDYTQDLTLGIDTGSGTIGTAVSKNNGDIVYMSEVVVRNDITDKMAQRAKYRRNRRNRKTRYRKARWLNRSNSIKKDRFSPTMQSKLHSHVREIEYIQSILPITEMVFETGQFDMHLMKNPSLANPKVRHWGYHKGTNYGFENTKAMVLNRDNYTCQCCKGKHKDSKLEVHHVIFRSQGGSNEESNLITLCHTCHKNLHSGKVNLKLKGKMKGNLKYATQMNSICKQLFRLYPNAIETFGYVTKANRLHLGVDKEHYYDACTIATQGNAFNIKSNLYKKKCVSDGDFQKTKGIRSEQSIVTDKIWGFRKFDKVCYFGNDYFIKGRMSTGYAILMDIDGNKIDFSTMPRGYKTPKLSNCKRITARSTVMMQVEVV

SEQ ID NO: 21230 - protein, 456 aa, unidentified; identical to SEQ ID NO: 17536

SEQ ID NO: 21231 - protein, 518 aa, Anaerostipes sp.; identical to SEQ ID NO: 4915

SEQ ID NO: 21232 - protein, 455 aa, unidentified
VWLSKPLATLGKDFDSSLEENSFFLVVNLLGKERDIMYVYVINKHGEPLMPCSSRKARTLLNNKKACVVKRTPFTIKLLHGSAGYKQPITLGVDAGSKHIGLSVSTETHEIYREEFAPRNDVVDLLSTRREFRRARRNRKTRHRAPRFNNRVHSKHKGWLAPSVEVKIQEHITVIKHVCQIMPISLVRVETAEFDTQRLKAMIAGKPLPVGTDYQLGEMYDEYNVRQYVLKRDNYTCQCCGAHATKTKQVKLHVHHLESRKVGGNAPNNLITLCPICHKAIHEGKKALGKKKRGKPLRDAAFMGIMRKTLLARLREELSIPVQQTYGYVTKMLREKNNLLKSHMNDALCIAKHPKAAPCENCYRSKAVRHHNRQIHKATILKGGIRKNNQAPYIVKGFRLWDKVLYNRQECFISGRRATGYFALKKLDGTVVTTGASYKKLRLLETTKNYLRERM

SEQ ID NO: 21233 - protein, 412 aa, Oribacterium sp.; identical to SEQ ID NO: 9063

SEQ ID NO: 21234 - protein, 395 aa, unidentified; identical to SEQ ID NO: 14042

SEQ ID NO: 21235 - protein, 493 aa, unidentified; identical to SEQ ID NO: 2644

SEQ ID NO: 21236 - protein, 432 aa, unidentified
MLNKNSVFVLNNNKVPCDPIHPAKARKLLSEGKAAVFRNYPFTIILKSESKPTKNYRIKVDPGAKFTGLALLSNSNIIWCAELEHRGFQISESLIKRRQVRRFRRNRKTRYRQPRFLNRTRPNGWLPPSLISRVQNIKSWVDKLIKLVPVSAISMELVKFDTQKIVNPEIQGTEYQKGELFSYEVREYLLEKFNRTCVYCGTKEAVFNLDHFHPKSRGGSDKVSNLVLSCFQCNQNKRARLPTEFLSDRPKLLALINKQRKLPLADAAAVNATRWKLKLVLESTGLEIETGSGGLTKYNRKRNGISKSHWTDAACVGTSTPDSLNISNYQPLIIKAMGRGNRQMVKPDKYGFPKRKPKLRQKSFYGFQTGDIVKAVVTKGKKIGTYVGRVAVRKTGNFNIKTQTETVQGISYKYCKIIHKSDGYIYSFGEER

SEQ ID NO: 21237 - protein, 512 aa, unidentified; identical to SEQ ID NO: 5811

SEQ ID NO: 21238 - protein, 199 aa, unidentified
PDNHGTLCDDCHKKFHLGIITDVKLKTRRRQSTRDAAFMGIMRKTLMWRLRTELFIPVAETKGYITKATREKLLVLPKSHTRDALAIAQGRHGFGIKEYAYVEPANHIYTVRPVRHHNRQLHKASILKGGIRKRNQASKYVFGFRLYDKVLYQGKACFVWGRRTRGTFLLRTIDGIKVKDGVSYRNLTLLERSSNYLIA

SEQ ID NO: 21239 - protein, 512 aa, unidentified
MSTVYVLNKDGKPLMPTTRGGHVRHLLKEQKARVVRTKPFTIQLLYETDDVVQPLYLGIDPGRTNIGVAVVKTDGTAVFTAHLETRNKEIPKLMQGRKKARRARRTNGRRCRRQRRAKANGTISKKCVKQTTAQNGSVSKRAKEIGVIKRHLPGCEKEVLCIGIKNKEAKFSNRVRPEGWLTPTANQLLQTHINLVKKIQKFLPISDVVLEVNKFAFMQLDNPNIQKWQYQQGPLYQKASFEEAVSEMQEHHCLFCKNTIDHYHHVVPQSENGSNTIGNIVGLCTKHHDLVHKDTTWQKKLAKKKTGLNKKYGALSVLNQIIPALTKELSSLFSKHFFATNGKSTYDYRAAHGVSKDHWLDAYCIACSVLPNDVCDSDINNRVPYELKQFRRHDRRALHKENMSRVYTLNGKSVATNRHKAIKQTTDSLEEFRQCQPDDVCKLKVKEHHPEYRNPKRNFPGCVFLVGKHTHVIQGTSGSHNGKADGYYDTNGNSYSSGKCKFVAKNEGIVFT

SEQ ID NO: 21240 - protein, 545 aa, unidentified
LSRTIPLTANTQPRETQPPVSAGETYSKRRVAYMPTVYVLNKDGKPLMPTTRCMHVRHLLKNGKARVVKSKPFTIQLLYETDDVVQPLYLGIDPGRTNIGVAVVKADGAAVFTAHLETRNKEVPKLMKKRKESRCARRTNGRRCRRQRRAKTNGTISKKCVKQTTAQNGSVSKRAKEIGVIKRHLPGCEKDVLCIGIKNKEAKFTNRARPEGWLTPTANQLLQTHINLVKKIQKFLPISDVVLEVNKFAFMQLDNPNIQKWQYQQGPLYQKGSLENAVSEMQEHHCLFCEKPIEHYHHVVPKSENGSNTIANIVGLCTEHHNLVHKDATWQKKLVKEKVGLVKKYSALSVLNQIIPALTKEMNSLFPKHFFVTNGKSTYDYRTAHGVSKDHWLDAYCIACSVLPNDVCDSNINSHVPYELKQFRRHDRRVLHKANMSRVYTLNGKTVATNRHKAIKQTTDSLEEFRQSHPGDVCKLKVKEHHPAYRNLNRNYPGSVFLVDGQVHVMQGVSGSHNGKADGYYNTNGNAYPYYKCKFVVKNEGIVFA

SEQ ID NO: 21241 - protein, 455 aa, unidentified
LYQAVYNLGEGFLPSSEERTAFYWLLIYRKEHGIMQYVYVLNKHGEPLMPCSPGKARLLLKQQKACVVKRTPFTIKLLYGSAGYKQPITLGVDAGSKHVGLSASTEKRELYREEFTPRNDVVDLLSTRRQNRRSRRNRKTRYRAPRFDNRVHSKRKGWLAPSVEVKIQEHITVIKRICRILPITLVRVETAEFDTQRLKAMLKGKPLPVGTDYQLGEMYDEYNVRQYVLKRDNYTCQCCGAHPTEKKPVRLHVHHLESRHVGGNAPNNLITLCVACHKALHEGKITLDKGKKRGKPLRDAAFMGIMRNTLLARLKDELNIPVKQTYGYITKLLREKNKIPKSHVNDARCIAKAPNAKPCDTMLYTRALRHHNRQIHKAKILNGGIRKKNQAPYLVKGFRLWDKVRYNGEECFITGRRSSGYFALKKYDGTVISNSASYKKLMLLEAATNYITERS

SEQ ID NO: 21242 - protein, 493 aa, unidentified; identical to SEQ ID NO: 2644

SEQ ID NO: 21243 - protein, 279 aa, unidentified
VVVETAEFDLQLLKAIADGKPVPQGEDYQQGEMYGHYNVRQYVLWRDGYTCQCCGAHATKKKEVRLHVHHLESRKVGGDAPDNQVTLCESCHEKLHKGLIAEKDFKKRKRRSTRDATFMGIMRKTLMQRLCSELPIPVIETRGYITKATREKLLVLPKSHTNDALAIAQGKQGFNVGYLPGIVQINKIYTIRPVRHHNRQLHKATILKGGIRKSNQTEKYVFGYCLFDKVQFNGQDCFIWGRRTTGIFTIKTINGKMIKDGISFKKLKPVEKSTGYLIA

SEQ ID NO: 21244 - protein, 470 aa, unidentified; identical to SEQ ID NO: 2825

SEQ ID NO: 21245 - protein, 512 aa, unidentified; identical to SEQ ID NO: 16896

SEQ ID NO: 21246 - protein, 404 aa, unidentified
LKVFVLNMRGKPLMPCSPAKARHMLKAGKAVVVRRTPFTIKLTIATGETKQDVTLGVDAGARHVGISATTEKEEVFASEVKLRQDITGLLADRLAFRRARRNRKTRYRSPRFNNRVRSKHKGWLAPSVENRIQAHMSRIDAVCRLLPVTKIVIETASFDIQKIRNPEVEGTGYQQGDQLGFWNVREYVLFRDSHVCQHCHGRSRDKILNVHHLESRKTGGDAPNNLITLCETCHKAYHAGKIKLKVKRGQSFRAEAFMGIMRWTLLDRVRKTHPKLPVENTYGYLTKHKRIALGLPKTHCADAFCIAGNLKALRRGDFLFQQQTRKHNRQIHKCSILKGGVRTLNQAPFLVKGFRLFDKVRIGGQIGFVFGRRVGEALQKPSRLESFCLLRRPNYCTNDCSGYF

SEQ ID NO: 21247 - protein, 450 aa, unidentified; identical to SEQ ID NO: 5194

SEQ ID NO: 21248 - protein, 376 aa, unidentified
MVYVVANDGQPLMPTERHGKVCRMLRSGMAKVIKKCPFTIQLQYESERNVQPVSLGVDAGSKHIGISATTKAKVLYESDVELRDDIVKLLATRRQLRRSRRSRKTRYRPARFDNRKRKEGWLAPSIRQKIGSHLTVVANVCKILPINQIIVETASFDIQKIKNPEIQGIEYQQGEQMDFWNVREYVFFRDGHTCQCCKGRSKDKILNVHHIESRKTGGNAPNNLITLCETCHKGYHNGTVILPKNIKRGMQFKDAAFMGIMRWAFYNALKEQYEPAVPVSMTYGYLTKNTRIEHGLLKEHYIDARCISGNPDAVSDGTYYYQKKVRCHNRQIHKQTILKGGIRKSNQAEYLVKGYRLFDKVRYQGRKNYLIERRTV

SEQ ID NO: 21249 - protein, 446 aa, Pseudomonas sp.; identical to SEQ ID NO: 10661

SEQ ID NO: 21250 - protein, 430 aa, Desulfobacter sp.
LNVFVLDTNKKPQNPVHPAKARLLLTEGKAAVFRQFPFTIILKETVLDVASNPLRIKIDPGSRDTGIAVINDDTGEIVFAMELRHRGQQIKNNLESRRAIRRSRRNRKTRYRKPRFDNRTRAEGWLPPSLKSRIHNIETWVNRLCRFCNIQAISMELVRFDMQKIQNPEISGVAYQQGELMGYEVREYLLEKWDRTCAYCGKTDIPLEIEHIVPKSKGGSNRVSNLTLACTACNRKKGNKPLEHFLSRKPRLLKRIQKQSKVPLKDAGAVNTTRWDLFRTLKKTGLPVETGSGGLTKFNRTTRGLHKTHWLDAACVGKSTPEKMFQIDKAVLIVKADGHGSRQMCRVNKFGFPRTTAKSTEKKVKGFQTGDIVKAVVTSGKKVGTYIGRVAVRKSGSFNIKTVDKTVQGISWKYCRLLHASDGYSYNTTC

SEQ ID NO: 21251 - protein, 456 aa, unidentified
MSTCVCVLTNNGERLMPTFRLGKVRHLLKDGKAKIVKHHPFTIQLLYDSKTNTQPIETCEDVGYNYIGISVKSESHEYVSAQYDTLQDEKEHHDDCRKYRRTRRNRLRYRKSRFDNRKRDKGWLAPSLEHKKHLNISLIERYVSVIPITHVTVEVGSFDTMLLQSIQKGEAKPEGADYQKGPRYNLATLREAVFYRDNYTCQVCKRKIANGAILHMHHMFYWKGRHGYQLDELVTVCEKCHTPANHQKGGKLYGFGKDKKFANLSGAAFMNAVRWQIVNALYATYGKEFVTITYGAMTKEKRIALQLEKTHNNDAYAMGDYHPARRCKFRHYQKRRRNNRVLEKFYDATYVDTRTGNKAKGKELFNGRISRNHKKDCKNLHKYRSKKVSKGRRSIRRQHYAIQPYDTVRLEGKTYITSGCHNKGTRLLIPVNGKSKSVAISKVQVVCHAGAWIQII

SEQ ID NO: 21252 - protein, 423 aa, unidentified
  REGION 1..423: note = IscB polypeptide
MLVYILDKDNKPLMPCSPRVAKLLLRDGKAIVAQRTPFTIKLVFGSSGYKQDVTLGVDAGSKTIGLSATLVPPSNGRTETDKKEVFSAEVQLRTDIVDLLSIRRQNRRTRRSHKTRYRKARFQNRKKDKSWLAPSIRHKIDTHLTMVDKIHKILPITKIIVEVAQFDIQKIKNPDISGIEYQQGVQLDFFNAREYVLYCDDHKCQLCNGKSKDKILNVHHIESRKTGGNAPNNLITLCETCHKKHHEGDVTLKIKRGHIFKDASFMGVMRWAFYNTLKEKYPNVKMTYGYITKNTRITNKLSKDHRTDALCITGNPTVIGLDTWYYCKKVRCQNRQIHKNTINKGGARKINQSPFIVLGFRLFDKVKYDNQECFVFGRRLSGSFDIRLLDGTKVNAGVGYKKVKVLEQRKTILIERRGNSSNG

SEQ ID NO: 21253 - protein, 424 aa, unidentified; identical to SEQ ID NO: 8578

SEQ ID NO: 21254 - protein, 465 aa, unidentified
MSTCVCVLSNSGERLMPTFRLGKVRRLLKDGKAKIVKHHPFTIQLLYDSKANTQPIEICEDVGYNYIGISVKSQSHEYVSAQYDTLQDEKEHHDDCRKYRRTRRNRLRYRKPRFDNRKRGEGWLAPSLRHKKKLNVNVVKMYCAVMPITHATIEVGSFDTMLLKAVQEGKAIPEGADYQKGPRYNLATLREAVFYRDNYVCKVCGRKATEGAILHMHHMFYWKGRHGNSLDELLTVCEKCHTSANHQKGGKLYGFGEDIKFTDLSGAAFMNTVRWQIVNELYTAFGKPFVTITYGTMTKEKRIALHLEKSHNNDAYAMGEFHPNHRCTFEHYEKVRRNNRTLEKFYDSRYIDIRTGEIATGKELFNGRINRNHKKDSENLHRYRGKRTYAGHRALTRKKVNLNPGDLVSLNGEVLVVHGTHTNKKGAVNVEFKAPAKNGQKSASLKKLKIVKAADSIHPAWEKVS

SEQ ID NO: 21255 - protein, 259 aa, unidentified
PVPQGEDYQKGEMYGHYNVRQYVLWRDGYTCQCCGAHATKKKEVRLHVHHLESRKVGGNAPGNLVTLCDRCHEKLHKGLITEKDLKKRKHRSTRDATFMGIMRKTLMQRLCSELPIPVAETRGYITKATREKLLVLPKSHTNDALAIAQGKQGFNVGYLPGILQIDKIYTIRPVRHHNRQLHKAAILKGGIRKSNQAGKYVFGYRLFDKVQFNGQDCFIWGRRTSGYFVVKTIDGKVIHNSASFKKLRLVERASNYLIA

SEQ ID NO: 21256 - protein, 386 aa, Anabaena sp.
MSKAFVLDTKKRPLDPIHSAQARQLLRSKKAAIYRQFPFTIILKESRSDSPISPLRLKIDPGAKFTGMALVNDANGEVVFAAELKHRGFAIRDALTSRRQLRRSRRARKTRYRQPRFLNRTRPERWLAPSLQSRIENIKTWVERLRKLAPIEAISQELVRFNMQLMTNPDIQGKEYQRGSNSITNLTLSCEKCNTKKGTKDIKYFLKKDPLKLEKILKQAKRPLADAAAVNTTRTALLEVLKATGLPVETGSGGLTKFNRSEQNLEKTHWIDAACVGKSTPILNIKGVKPLLITANGHGSRQSCRTDKYGFPSRHVPREKIHFGFQTGDIAKAVVTTGKKIGTYVGKVAIRSTGSFNIYTKNGLIQGISHKFCKRIHAKDGYSYAQ

SEQ ID NO: 21257 - protein, 408 aa, unidentified; identical to SEQ ID NO: 4810

SEQ ID NO: 21258 - protein, 518 aa, unidentified; identical to SEQ ID NO: 11015

SEQ ID NO: 21259 - protein, 349 aa, unidentified
IKNKETKFTNRTRPEGWLTPTANQLLQTHINLVKKIQKFLPISDVVLEINKFAFMRLDNPNVQKWQYQQGPLYQKANLEETVSEMQEHHCLFCKKKIDHYHHVVPQHKNGSNTIDNIIGLCTQHHDLVHKDATWQKRLAKKKTGLNKKYGALSVLNQIIPALTKELSSLFPKHFFVTNGKSTYDYRAAHGVSKDHWLDAYCIACSVLPNDTCDKTINSRVPYELKQFRRHDRRALNNENMSRVYTFNGKMVATNRHKATEQTTDSLEEFRQRQPNDVCNLKVKEHHPTYRNMNRNYPGSVFLVGNQVHVMQGIAGSKDGEATTYKDTNANSIAAGKCKFVAKNSGILFV

SEQ ID NO: 21260 - protein, 470 aa, Blautia sp.; identical to SEQ ID NO: 2925

SEQ ID NO: 21261 - protein, 512 aa, Bacteroides sp.
MSTVYVLNKDGKPLMPTTRGGHVRHLLKEQKARVVRTKPFTIQLLYETDDVVQPLYLGIDPGRTNIGVAVVKTDGTAVFTAHLETRNKEIPKLMKKRKDSRRARRTNGRRCRRQRRAKANGTISKKCVKQATAQNGSVSKRANEIGVIKRHLPGCEKEVLCIGIKNKEAKFSNRTRPEGWLTPTANQLLQTHINLVKKIQKFLPISDVVLEINKFAFMRLDNPNVQKWQYQQGPLYQKASLEEAVSEMQEHHCLFCKNTIDHYHHVVPQSENGSNTIGNIVGLCTKHHDLVHKDTSWQKKLAKKKTGLNKRYGALSVLNQIIPALTKELSSLFPKHFFATNGKSTYDYRAAHGVSKDHWLDAYCIAGSVLPNDACDNNINNHVPYELKQFRRHDRRALHKENMGRVYTLNGKSVATNRHKAIKQTTDSLEEFRQRQPNDVCKLKVKEHHPEYRNPKRNFPGCVFLVGKHTHVMQGTSGSHNGKADGYYDTNGNSYSSGKCKFVVKNEGIVFT

SEQ ID NO: 21262 - protein, 416 aa, Anoxybacillus sp.
VLSTSQALPTWGKRKNTPRKEVHALFVYVINKHGNPLMPCSPRKARILLKNKKAKVVKRTPFTIQLLYGSSGYKQPISLGVDTGTKHVGLSATTKNQVLLEAEVQLRTDIQELLATRRQFRRSRRNRNTRYRKARFLNRKKPNGWLAPSTQHKVDSHIKLVKWVHSLLPITHITVEVAQFDTQKIKNPDIQGAAYQQGEQLGFWNVREYVLYRDGHTCQWCKGKSKDPVLNVHHIESRKTGGDSPSNLMTLCKTCHDMIHREGLEHEIQRRFSSLKDASHMTVMRWFIWNGLKKVYPHANITYGYITKCIRIANGLPKSHMVDARCISGNPLAKPSGTVYLLKFVRKNNRQLHKATILKGGKRKSNKAPRFVKGFQLFDKVVYEGKECFIFGRRSSGYFDLRLLDGTKVHASASWK

SEQ ID NO: 21263 - protein, 431 aa, unidentified; identical to SEQ ID NO: 10863

SEQ ID NO: 21264 - protein, 413 aa, Blautia sp.; identical to SEQ ID NO: 9603

SEQ ID NO: 21265 - protein, 382 aa, unidentified
DTLQDEKACHDSCRKLRRSRRNRLRYRKPRFDNRKRDDGWLAPSLRHKKELNVNVVKMYCAVMPITHATIEVGSFDTMLVKAIQEGKAIPEGADYQKGPRYNLATLREAVFYRDNYVCKVCGRKATEGAILHMHHMFYWKGRHGDSLDELLTVCEKCHTPANHQKSGKLYGFGENVKFADLSGAAFMNTVRWQIVNELYAAFGKGFVTITYGAMTKEKRIALQLEKTHSNDAYAMGEFHPNHRCTFEHYEKVRRNNRTIEKFYDSRYIDIRTGEIATGKELFNGRINRNHKKDSENLHRYRGKRTYAGHRALLRKKVNLNPGDLVSLNGEVLVVHGTHTNKKGAVNVEFKVPAKNGQKSASLKKLKIVKTTDSMHSAWEKIS

SEQ ID NO: 21266 - protein, 199 aa, unidentified; identical to SEQ ID NO: 21238

SEQ ID NO: 21267 - protein, 419 aa, unidentified; identical to SEQ ID NO: 8452

SEQ ID NO: 21268 - protein, 423 aa, unidentified; identical to SEQ ID NO: 10848

SEQ ID NO: 21269 - protein, 421 aa, unidentified; identical to SEQ ID NO: 4235

SEQ ID NO: 21270 - protein, 439 aa, unidentified
MVLVVDKHKKPCNTISEAYARRLLFKKQAVIHKRFPFTIRLKNDNAVSKDRAYTVKVDPGSKHTGIAITDNKDSVVMLAEIEHRGHVIKKNLGKRRAVRNSRRQRKTRYRPARFLNRTRPKGWLAPSVKSRADNVINFIKKYKKLINISKVMIENVSFDVSQMTAGTKLCGSGYQQGPLYQKELRSFIFSRSGGKCVYCGTKATEIDHIVPRANGGTNSTYNLVASCRNCNQIKSNLTLKAFGKKMNKNYSHLEPKKLPKDAAIVQTARNYMVREISNLVPNTTTYDAWLTKYNRNKLGLSKQHYYDALSVGDVANYKFLTDKVLQISAQGRGSRQMCSMNKFGFPRTSAKASKSVKGFQTGDIVKAIVTKGLKKGEYLGKVAVRSSGDFDITTNKERIQGIRYKYCHLIQRGDGYLYSYKECDSFSDINNRVSIAKIQ

SEQ ID NO: 21271 - protein, 535 aa, unidentified
MYRLTTEAGIPLIPERLHDTKKRKEASRMSEYIYVIGVDGDPQMPTKRKRHVEQLLQTGRARIFRQVPFTIQLTYENEPVLQPVTIAEDPGRSNIGMAVVSLSGELLSAAVVQTRNKEIAKLMEKRKQHRRASRNGERRARQRLAKKYHTMITAGFLMRKLPMYGKDKRVRCNVIKNTESRFCNRKRENGWLTPSAEHLVRTHINLIHKMQKFLPITDVAIEINRFAFLSLEDPSISGVDFQNGPLKGYDDLNAAVEDLQDGHCLMCNSPIEHRHHIVPRSMQGSNTIGNIAGLCCKCHERVHKDTRFEDRLKKKKAGLDKRYAAVSVLNQAIPFICKRLEQEFEKEHVHYCSGRDTGMVRRPFGYHKTKEEQLHEVDAWCIAVLALQHVPEKAPEFDHVHEILQFRRQDRSRIKAQTSRAYYHEGKKIAKNRKKAEGQRDDSLQEWRKRQVERYGKEQTRKMISQLEVKESIRRYNRLDRLMPGAVFYYQGVRYVMRGQHSNGQYLQAVGMGSKDFPAKKCKIVANNEGLVFVS

SEQ ID NO: 21272 - protein, 363 aa, unidentified
MTNYVFVLDANGKHLSPTKEQKAWFFIRKKRATLVSKYPMVIQLNKEIPDDKICKDEIRCGIDDGGLHTGIALVQKCQTKNKVLFKGVIEQRNDVKHLMDVRRGYRRYHRYHKRYRPARFNNRSSSKKEGKIAPSILQKRQATIRAVAQLNKWINITDYWLEDVAIDIRALTDGFKPYKWQYQKSNRLDENIRKAVILRDGCQCVECGRTNCKLEVHHIKPRRSNGSNALSNLITLCERCHQNTEGREELFMDKYFALLNSSDNKYLNYAQHVMIGKKWLREQLSSLGILHLTNGGDTANKRIDWNIEKFHSNDAICITNLQPDTCDVKEWTIKPMRRQSKAKADNVLGIKHRDLVEYTFKSG

SEQ ID NO: 21273 - protein, 427 aa, unidentified; identical to SEQ ID NO: 4946

SEQ ID NO: 21274 - protein, 475 aa, Sutterella sp.
MPVCSTLARGIAPPARAEHVTGISPKNRKVHFFMSTTVFVLDKKHRPLMPCRPARARRLLRAGRARVVKRFPFVIRLVDRTVEQSEVQPVLIKLDPGSRETGAAVVRDDGKKRHHALAFFVIEHRGGAIRDALKARSAFRRRRRSQNLRCRSPRFLNRVKPKGWLPPSLRHRVETTLSFVRRMCRYLPVSGIATELVKFDSQKLQNPEVSGVEYQQGTLFEYEVREYLLEKFGRKCVYCGAEGVPLNIDHVVPRAKGGSNRVSNLVLACMSCNQKKGARSLEDFLKGKPKVLARVRRELKTPLRDAAAVNATRWVLFNELKATGLPVETGSGALTKLNRHAFGVEKEHWLDALCVGRLNGVVTRKGLNVLEIRCMGRGSRQRTRLTKYGFPRGYLMRQKCVHGFATGDMVEANVPKGKKAGLWRGRVAVRVSGSFNIQTPKGVIQGVGWKHCRLISHNDGYGYAWLGHAPHSSPA

SEQ ID NO: 21275 - protein, 442 aa, unidentified
MVTVQQSTHHLPFGRVFIRRNLFMVYVISQDGKPLMPCSDPIARLLLKQGKAKVKKREPFTIKLTYETTNHTQGLTLGVDTGSGTIGTAVSKDNGDIVYMSEVVVRNDITDKMTQRAKYRRNRRNRKTRYRKARWLNRASSIKKDRFSPTMQSKLHSHVREIEYIQSILPVTEMVFETGQFDMQLMKNPSLANPKVRPWGYQKGANYGFENTKAMVLNRDNYTCQCCKGKHKDSKLEVHHIVFRSQGGSDEESNLLTLCHTCHKDLLSGKINPKLSGKVKGNLKYATQMNSIRKQLFRFYPNAIETFGYVTKANRLHLGVDKEHYYDACTIATQGNAFNVKSNLYKKKCVSDGDFQKTKGIRSEQPIVTDKICGFRKFDKVRYFGNDYFIKGRMSTGYAILMDIDGNKIDFSTMPRGYKTPKLSNCKRITARSTVMTQVKVV

SEQ ID NO: 21276 - protein, 419 aa, unidentified; identical to SEQ ID NO: 5677

SEQ ID NO: 21277 - protein, 422 aa, unidentified; identical to SEQ ID NO: 13660

SEQ ID NO: 21278 - protein, 413 aa, unidentified
MTNYSFVLDADGKRLAPTKEQKAWFLIRKKRAVLVSKYPMVIQLNKTVPEPEICRDEIRCGIDDGGLHTGFALVQKCKTKNKVLFKGTIEQRNDVKHLMEVRRDYRRYHRYHKRHRPARFDNRGSSKRTDRVAPSILQKRQATMRVIRWLNKWIRITSFWLEDVAIDIRALTDGFKSYSWQYQNSNRLDENIRKAVILRDGGKCMECGRSGCRLEVHHIKPRRSNGSNTLGNLISLCESCHQKTEGKEELYMQHFFTMLNSFDNKNLNYASHVMIGKKWLREQLSQLGSLYLTTGGDTANKRIDWNIVKTHSNDAICITDLRPDTCDIKDWTIKPMRRQNKAKTDQVLGISHRDLVSYTYKNGETYTGYVTALYSELNALNFQSPTKHCKKVNAKKCRLLWKFSKIYWLDNVG

SEQ ID NO: 21279 - protein, 265 aa, unidentified
AVAEGKPVPQGEDYQKGEMYGHYNVRQYVLWRDGYTCRVCGAHGSVKKGVPLHVHHLESRKVGGDAPDNLVTLCTACHDKLHKGIITAADLKKRKRRSTRDATFMGIMRMTLLRRLREQLPVPVVETRGYITKATREKLLVLPKSHTNDALAIAHGPQGFRAGYLPNIRQADRLYTIRPVRHHNRQLHKATILKSGVRKANQAETYICGFRLYDKVLYNGIECFVWGRRTSGSFLLRQLNGEKVKDGVSHKHLKLLERSQSYLVA

SEQ ID NO: 21280 - protein, 518 aa, unidentified; identical to SEQ ID NO: 2751

SEQ ID NO: 21281 - protein, 411 aa, Virgibacillus sp.; identical to SEQ ID NO: 14618

SEQ ID NO: 21282 - protein, 415 aa, unidentified; identical to SEQ ID NO: 4916

SEQ ID NO: 21283 - protein, 462 aa, unidentified
MSVLVIGRNGRALMPTNPRKARLLLKKKTASVVCRHPFTIQLLYKTGCATQEGSIGIDTGSQHIGVGITCGDKVILKDEHALRSSMEKRSLLATRAVMRRGRRYRKVRYRKPKWRHHTKRMYFEKANRRGQHWRKVKTTTQSPRSKGWLPPSLQSKCDHHFRIIDRYLKYLPDPITRNLVIEAGRFDMARMNDPTIHGEMYQRGPMYDAENLRAYIFARDNYQCACCKAKAGTTRKADGTTVKLVAHHILFRSRGATDNPKYIISVCDHCHTTKAHQPGGILYSWMENNKKVARGLRDATFMNILRKRLFARYPQAAFTYGNITAADRKKLRLPKSHANDAVAISLFGKEASTVKNICQTMHYKQIRKSKRSLHEAIPRKGRKNPNTKAVRNKKNTTQVNGFKLWDSVLADGKKLFICSFTGTSAYLIDKNGCYISQPGKTYKQWPLSKLKRLHPNGNWLMA

SEQ ID NO: 21284 - protein, 430 aa, unidentified; identical to SEQ ID NO: 10265

SEQ ID NO: 21285 - protein, 423 aa, unidentified; identical to SEQ ID NO: 6814

SEQ ID NO: 21286 - protein, 456 aa, Idiomarina sp.; identical to SEQ ID NO: 15257

SEQ ID NO: 21287 - protein, 431 aa, unidentified
MPNKVYVINKHGRPLMPCSPAKARHLLDAGKAKVKKRTPFTIQLLFGSTGYTQEVILGVDAGSKTIGMSTSTKKEEVFAADVTPRNDVVDLMSTRREFRRARRNRKTRYRKPRFDNRVRSKHKGWLAPSEEVKIQEHITAIKMVCRILPVSKVVIETAEFDLQLLKAIEEGKPVPQGEDYQKGEMYSHYNVRQYVLWRDNYTCQCCGAHATKKKEVRLHVHHLESRKVGGDAPDNQVTLCESCHEKLHKGLIAEKDFKKRKRRSTRDATFMGIMRKTLMQRLYSELPIPVIETRGYITKATREKLLVLPKSHTNDALAIAQGKQGFNVGYLPGILQIDKIYTIRPVRHHNRQLHKAAILKGGIRKSNQAEKYVFGYRLFDKVQFNGQDCFIWGRRTTGIFTIKTINGKMIKDGISFKKLKPVEKSTSYLIA

SEQ ID NO: 21288 - protein, 415 aa, unidentified; identical to SEQ ID NO: 6436

SEQ ID NO: 21289 - protein, 416 aa, unidentified
MVYVLDKNGQTLMPTDRHRKVRLMLQSGQAKVIKRCPFTIQLNYDSGHQTQEISLGIDAGSKHIGVSATTKIKVLYEADVELRNDIVDLLSSRRELRRGRRNRKTRYRQAKFNNRRRGNGWLAPSIRQKIGTHLTVVENICKILPISRIMVETASFDIQKIKNPDIQGAEYQQGDQLGFWNVREYVLFRDGHTCQCCKGKSKDKILNVHHIESRKTGGNAPNNLITLCETCHTGYHKDTVQLPKAIKRGMRFKDAAFMGIMRWAFYEALKQQYEPVGTPVHNTYGYITKHTRIEHNLPKEHYVDARCISGNPEASSNGEYYYQKKVRCHNRQIHKLTVLKGGIRKQNQATYLVKGYRLFDKVSYQGKGYFVFGRRQSGFFDIRTLSGEKVNKGSLSCKKLKFIATRTYYLTERRAV

SEQ ID NO: 21290 - protein, 332 aa, unidentified
GKPLMPCSPAKARLLLKERNAIVVRRTPFTIQLTIATGETKQPVSLGVDAGYKHVGLSASTEKAELYASEIELRQDTTDLLSARRELRRARRNRKTRYRGPRFDNHIRTKRKEWFAPSVENRINAHLSRIEKVLRLLPVTTITVETASFDTQLLKNPDISGKEYQEGEQLGFWNIREYVLCRDGHVCQHCYGRSKDPVLNVHHLESRRTGGDSPGNLITLCETCHKALHRGEITLKAKRGQSFRAEAFMGIMRWEVLDRLKASHPELEVQNTYGYRTKHVRIANGIAKSHCADAFCIGGNLGAERLGEFFFQKQTRRNNRQIHKLSILKGAL

SEQ ID NO: 21291 - protein, 268 aa, unidentified
VETAEFDTQRLKAMLKGKSLPVGTDYQLGEMYDEYNVRQYVLKRDNYTCQCCGAHPTEKKPVRLHVHHLESRHVGGNAPNNLITLCVACHKALHEGKITLDKGKKRGKPLRDAAFMGIMRNTLLARLKDELNIPVKQTYGYITKLLREKNKIPKSHVNDARCIAKAPNAKPCDTMLYTRALRHHNRQIHKAKILNGGIRKKNQAPYLVKGFRLWDKVRYNGEECFITGRRSSGYFALKKYDGTVISNSASYKELMLLEAATNYITERS

SEQ ID NO: 21292 - protein, 424 aa, unidentified
MVLVVDKHKKPCNTISNAYARMLLFKKQAVIHKRFPFTIRLKNDNAVLKDRAYTVKIDPGSRHTGIAIVDDKDQVVMLAEIEHRGHIIKKDLASRRMVRRNRRNRKTRYRPARFLNRTRPKGWLAPSVKSRADNVINFIKKYKKLINIDKVMIENVSFDTAQMSSNTKLWGNTYQQGPLYQNKLRSFIFSRSNNKCVYCGAKATDIDHVIPRANGGTNSVHNLVASCRACNQMKSNKTLKEFGKIMDRDFSHLEPKKLPKDAAIVQSARNYMVKEITKLVADTTLHDAWLTKYNRDQLGLPKEHYYDALSVGNVENYKFLTDKILTISARGRGSRQMCSMDKYGFPRTKPKGSKLVEGFQTGDMVKAIVPKGPKQGEYLGRVAVKSSGYFDIKTKNGLAQSIGYKYCRLIQKNDGYSYNYKERI

SEQ ID NO: 21293 - protein, 406 aa, unidentified; identical to SEQ ID NO: 3795

SEQ ID NO: 21294 - protein, 426 aa, unidentified
MVYVQNHLGQPLMPTQDHRKVRLLLKAGAAVVVRRMPFTIRLTTRTKTYVQPVILGVDAGSKTVGMSAATHEEEVFAAELTPRNDVVKNLADRREFRLSRRGRTTRYRQPRFNNRVHSKHKGWLAPSVEVKIQEHITSIKRACELLPIGKVVVETAEFDLQLLKSIADGMPVPQGEDYQKGEMYGFYNVRQYVFFRDGYTCQCCGAHGKGIKFHTHHLESRKTGGNAPDDLVTVCDKCHKAFHAGLITDAKLKKRRRKSTRDAAFMGIMRKTLLQRLRAELPIPVVETRGYITKATRERLLKLPKSHTNDALAIAMGRHGFGIEEVTYMPQSDRIYQIKPVRHHNRQLHKALPKKGGRRQRSQGPKYVQGFRRFDKVLYRGQECFIWGLRTRGYFQLKLLNGTKVHESAKASELILLEHSSGYLIA

SEQ ID NO: 21295 - protein, 522 aa, unidentified
MNYIDFVFVTDKDNLPCNPINEGYAGKLLRTGKAKIVNHDPLVIKRLDDYSSKNENRHTITLKVDTGFGNIGFSASDNKHEYIAGQVELLSGISDRLVTRKGYRTQRRSRLRYRRNKNIDYKTVNNPTYKNGNEDGWLAPSVIHKIESHVRVIDKIALWIPIDKVIIETANFDIQQIKATLNGIVINGIDYQKGEMYGFENAKQYVRERDNYTCQICKEKLTDKRHVVIEVHHIIPRSKGGSNKPDNMISLCHCCHKKVHENNNDNKLFRELQQRKIINTYKDATFMNTMRWELYNRLKENYDVSISFGYITRMNRKNAGLKKYHYTDAVCISEYHKITLTRNVYLVEQKRCNDRCMESFFDAKYIDSRDGKVKKGSELCKLRVATASSKRSTKKEDIDNKRIYRQEKVSKGKRRYENHSYCLKPGDLIYINYGNHKGNIAEVTTMQKNPNGTYKIVFSYANPKCKIPSINIKEKEYEELTHNQCEKVKIVRTRRGMIWRKVNRLEFEENTAEQIDKKVKNK

SEQ ID NO: 21296 - protein, 361 aa, unidentified
VTLGVDAGARHVGISATTEKEEVFASEVALRQDITGLLADRLAFRRARRNRKTRYRAPRFNNRVRSKHKGWLAPSVENRIQAHMSRIEAVCRLLPVTKIVIETASFDIQKIRNPEVEGTGYQQGDQLGFWNVREYVLFRDGHICQHCRGRSKDPILNVHHLESRKTGGDAPNNLITLCETCHKAYHAGKIKLKVKRGQSFRAEAFMGIMRWTLLDRVRKTHPELPVENTYGYLTKHKRIALGLPKTHCADAFCIAGNLKALRRGDFLFQQQTRKHNRQIHKCSILKGGVRKLNQAPFLVKGFRLFDKVRIGGQIGFVFGRRVRGIFNIRRLDKTVIGTDINCKKLSLLETRKTFLTELRKE

SEQ ID NO: 21297 - protein, 413 aa, unidentified
MVYVLNENGQPLMPTENHAKVRVLLKQGKAKVVNNCPFTIQLLYSSTNYTQPVTLGVDAGSKHIGLSATTEDKELYAADVELRNDIVKLLAVRRTSRRSRRNRKTRYRKPRFNNRRRDKGWLAPSIRHKINTHLKVVDDTCKLLPVSKIIVETASFDIQKIKNPDVKGADYQQGEQLGFWNVREYVLFRDGHKCQCCKGKSKDKILNVHHIESRQTGGNAPNNLITLCETCHTGYHKGTVKLPAKIKRGMKFKDATFMGIMRWAFYGELKKRYPDVSLTYGYITKNTRIENGLPKEHYVDARCISGHPLAKPLGTVFYIKKVRCHNRQIHKFKILKKGVRKRNQAEYEVYGFRLYDRVSWKGQTCFVFGRRSTGRMDLRLLDGTHINASVGYKNIKLLRMRSNYLIEVRNAIG

SEQ ID NO: 21298 - protein, 512 aa, unidentified; identical to SEQ ID NO: 10377

SEQ ID NO: 21299 - protein, 464 aa, unidentified; identical to SEQ ID NO: 3745

SEQ ID NO: 21300 - protein, 465 aa, unidentified
MSTCVCVLSNSGERLMPTFRLGRVRHFLKDGKAKIIKRHPFTIQLLYDSKTNTQPIEICEDVGYNYIGISVKSESHEYVSAQYDTLQDEKEHHDDCRKYRRTRRNRPRYRKPRFDNRKRGEGWLAPSLRHKKELNVNVVKMYCAVMPITHATVEVGSFDTMLVKAIQEGKAIPEGADYQKGPRYNLATLREAVFYRDNYICKVCGHKATEGAILHMHHMFYWKGRHGNSLDELLTVCEKCHTPANHQKGGKLYGFGENVKFADLSGAAFMNAVRWQIVNELYAAFDKPFVTITYGAMTKEKRIALRLEKSHNNDAYAMGEFHPNCRCTFEHYEKVRRNNRTLEKFYDSRYIDIRTGEIATGKELFNGRINRNHKKDSENLHKYRGKRTYAGHRALLRKKVNLNPGDLVSLNGEVLIVHGTHTNKKGAVNVEFKVPAKNGQKSANLKKLKIVKAAGSIHPAWEKVS

SEQ ID NO: 21301 - protein, 407 aa, unidentified; identical to SEQ ID NO: 3417

SEQ ID NO: 21302 - protein, 438 aa, unidentified
MVFVLDRSKKPLDMISHAKARILLKNRLAVIHKVYPFTIRLKDNSAVSKDRAYTIKLDPGSRTTGVAVIDDKDAVVMLAEIEHRGHIIKKNLDSRRAIRRSRRQRKTRYRPARFLNRTKPEGWLAPSVKSRADNVINFIKKYKKLLNINKVMIENVSFDVAQMSSDDCLIGSGYQQGNLYQKELRSFIFSRSGGKCVYCGAKATEIDHIIPRAKGGTNSTYNLVASCRSCNRKKSNLSLKAFGKKMNKDYSHLKPKKLPKDASIVQIARNYMVKGITKLVSDTTTHPSWLTKYNRDNLGLPKQHYYDALSVGNIENYKFLTDKILIISAKGRGSRQMCRVDRYGFPRTSAKASKTVKGFQTGDIIKAIVTEGLKTGEYLGRVAVRSRGYFNIQTKTQVVQGIGFEYCHIIQRSDGYSYNYKESDFLSAIHNRVPIAKI

SEQ ID NO: 21303 - protein, 432 aa, Lactobacillus sp.; identical to SEQ ID NO: 6011

SEQ ID NO: 21304 - protein, 499 aa, unidentified
MRYIYVLDMNGEPLMPTCRYGKVRRMLKSGQAKAVDTLPFTIQLLKPTKTRILQPVIAGQDPGRTNIGMAAVRSDGTELYRAHIETRNKEIVSLMNDRRSFRQASRRGERLARKRLAKKLHTTARHLNGRILPGCKEPLAVKDIINTEARFNNRLRPEGWLTPTATQLLRTHLEAFRKLSGILPVTEVVLEVNRFAFMQLDNPDMEKRDIDFCRGPLYGTGGVKAAVSLQQDGLCLLCREWEIEHYHHIVPRSRRGSNTISNIAGLCKKCHERVHKDQAAAERLQSKKDGLSKKYGGTSVLNQIILSLAEELGIRYPGHAHVTNGWNTKEFRKKHELEKDHDIDAYCIAASILEDVQPVMQTEPYEIKQFRRHNRARIHHQTERTYRYDRKIIAKNRKKRMDQKMDSLKDWVTDMTEQYGRDTASRMLSKATVQKSTRHYNTKGRMMPGTVFICRGKRFVMTGQLTGGAYYRAYGQDKKNFPAKAVQVIQKNKGLVYVA

SEQ ID NO: 21305 - protein, 431 aa, unidentified
MPNKVYVINKHGRPLMPCSPAKARHLLDAGKAKVKKRTPFTIQLVYGSSGYTQEVILGVDAGSKTIGMSASTTKEELLSAEVKPRNDVVDLLSTRREFRRVRRNRKTRYRKPRFDNRVRSKHKEWLAPSVEVKIQEHITSIKRVCRILPVSKVVIETAEFDLQLLKAIEKGKPVPQGEDYQQGEMYGHYNVRQYVLWRDDYTCQCCGAHTTKKKEVRLHVHHLESRKTGGDAPSNLITLCDSCHEKLHKGLIAEKDFKKRKRRSTWDATFMGIMRKTLMQRLCSELPIHVVETRGYITKATREKLLVLPKSHINDALAIAQGKHGFNVGYLPGILQIDMIYTIRPVRHHNRQLHKATILKGGIRKSNQAEKYVFGYRLFDKVQFNGQDCFIWGRRTTGIFTIKTINGKMIKDGISFKKLKLVEKSTSYLIA

SEQ ID NO: 21306 - protein, 420 aa, unidentified; identical to SEQ ID NO: 19328

SEQ ID NO: 21307 - protein, 406 aa, unidentified
MVYVQDIDGKPMMPTTRHGKVRQLLKDKKAVVINTCPFTIKLMYKTSDYKQEIVLGVDAGTKHVGLSATTKSKELYSGEVILRSDIVELLSTRRESRRTRRNRLRYRKPRFNNRIKSKRLGWVAPSVRHRIDAHIRVIDNICSILPVSRVIVEVAQFDTQKIKNPDISGDEYQEGDQLGFWNVREYVLARDGHKCQHCKGKSKDPILNVHHIESRKTGGDSPSNLITLCETCHKEYHKGNIDLKVKRGKSLRDAAVMGIMKWKLYEELKSRYPNVSMTFGYITKYNRIKYGIEKSHTSDAFVISRNFNAKRIERQYLKRLIRRHNRQIHKMKILKGGKKKNNQAPFEIFRFRLFDKVLYNNEILFVYGRRKSGNFNIRDFNGENPKDVSHKKLKLIRGKRHLIILK

SEQ ID NO: 21308 - protein, 417 aa, unidentified
MPCSPAKARLLLKEKKAIVKRRTPFTIQLTIATGEAKQPVTLGVDSGYKHIGLSATTEKAELYASQVELRQDITDLLSARLALRRSRRSRKTRYRAPRFNNRVASKRKGWLAPSVENRITAHMSRVEAVMRVLPVTAITVETAAFDTHLLKNPDIAGEAYQQGEQLGFWNVREYVLFRDGHVCQHCRGKSKDPILNVHHIESRRTGGDAPNNLITLCETCHKAFHRGEIELKVKRGKSFKAATFMGIMRWTLFERLKKAHPELRVRNTYGYLTKHKRISHGIAKSHCADAYCIADNLGAKRLEGFFFQKQTRKHNRQIHKLSILKGGLRKKNQAPYEVKGFRLFDKVICKGEEAFIFGRRTSGSFDVRRLDGTRISAGINYKKLRLLEPRTAYLTEFRMEAALPPLHKCRGFRAEFL

SEQ ID NO: 21309 - protein, 570 aa, Streptomyces sp.; identical to SEQ ID NO: 15590

SEQ ID NO: 21310 - protein, 424 aa, unidentified; identical to SEQ ID NO: 3434

SEQ ID NO: 21311 - protein, 415 aa, unidentified; identical to SEQ ID NO: 6044

SEQ ID NO: 21312 - protein, 410 aa, unidentified
MSKAFVLSLDGKPLMPMQYNKAWVFIRQGKARLVTFEPLTVQLTYRTATEATQPVRVGIDDGARTAGVAVVVEREQRGPEVVCAGEIRLRGDTKALLAARRQRRRRRRRQKRHRQPRSRRSKGKGWLPPSVRVRKENILRVVADLVWRAPISRIVWEEGQFDTHRLVEPEVEGARYQQGPGYGWENRRHAVLFRDGYRCQYCGEELVAAGKIAEVDHVIPRSRGGTDTFENLVCACRECNQRKGEQTAAEFSHPEVGGRTFAYPAYLQSGKRYLREGLEQLSSVEVVFSWQTKRWRKEMGLEESHVNDAVAIAVQGAETESPQGWMQIVARRRRRNFKRLKWKEKWGLRHWDLVCYTKRGGRKVVGTVRGFVESREEVKVRHAGCMNDPLKAKRVQLLQRQVAIAYAPWQ

SEQ ID NO: 21313 - protein, 512 aa, unidentified
MSTVYVLNKDGKPLMPTTRGGHVRYLLKEKKARVVTSKPFTIQLLYETDDVVQPLYLGIDPGRTNIGVAVVKTDGTAVFTAHLETRNKEIPKLMQGRKKARRARRTNGRRCRRQRRAKANGTISKKCVKQTTAQNGSVSKRAKKIGVIKRHLPGCEKKVLCIGIKNKEAKFSNRTRPEGWLTPTANQLLQTHINLIKKIRKFLPVNDVVLEINKFAFMQLDNPNIQKWQYQQGPLYQKASLEEAVSEMQEHHCLFCKKSIVHYHHVVPQSENGSDTIGNIVGLCIKHHDLVHKDTAWQKKLAKKKTGLNKKYGALSILNQIIPALTKELSSLFPKHFFATNGKSTHDYRAAHDVSKDHWLDAYCIACSILPNDTCDKNINGRVPYKLKQFRRHDRRALHKENMSRVYTLDGKKVATNRHKAIKQTTDSLEEFRQRQPNDVCKLKVKEHHPEYRNPERNFPGCVFLVGKHTHVMQGTSGSHNGKADGYYDTNGNSYPSGKCKFVAKNKGIVFA

SEQ ID NO: 21314 - protein, 417 aa, unidentified
MPCSPAKARLLLKEKKAIVKRRTPFTIQLTIATGEAKQPVALGVDSGYKHIGLSATTEKAELYASEVELRQDITDLLSARLALRRSRRSRKTRYRAPRFDNRVANKREGRLAPSVENRIAAHMSRVEAVMQVLPVTAITVETAAFDTQLLKNPDITGAAYQQGEQLGFWNVREYVLFRDGHVCQHCRGKSKDPILNVHHIESRRTGGDAPNNLITLCETCHKAFHRGEIKLKVRRGKSFKAETFMGIMRRTLFERLEKAHPELNVRNTYGYLTKHKRISHGIAKSHCADAYCIADNLGAKRLEGFFFQKQTRKHNRQIHKLSILKGGLRKKNQAPYEVKGFRLFDKVICKGEEAFIFGRRTSGSFDVRRLDGTRISAGINYKKLRLLEPRTTYLTEFRKEAALPPLHECRGFRAEFL

SEQ ID NO: 21315 - protein, 442 aa, unidentified; identical to SEQ ID NO: 11618

SEQ ID NO: 21316 - protein, 459 aa, unidentified; identical to SEQ ID NO: 11427
  source 1..459: note = Cyanobacteria bacterium UBA11367

SEQ ID NO: 21317 - protein, 465 aa, unidentified; identical to SEQ ID NO: 4783

SEQ ID NO: 21318 - protein, 465 aa, unidentified
MSTCACVLSKNGERLMPTIRLGKVCHLLKDGKAKIIKHHPFTIQLLYDSETNIQPIEICEDVGYNYIGISVKSQSHEYVSAQYDTLQDEKSCHDACRRMRRTRRNRLRYRQKRFDNRKRDKGWLAPSLKHKKELNVNVIKMYCEVVPITHATVEVGSFDTMLVKAIEEGKATPEGADYQKGPRYNLATLREAVFYRDNYTCQVCGREASEGAILHVHHMFYWKGRHDNSLSELITVCEKCHTPANHQKGGKLYGFGEDIKFANLSGAAFMNTVRWQIVNELYAAFGKPFVTFTYGAMTKEKRIALHLEKSHNNDAYAMGEFHPNCRCTFEHYEKVRRNNRILEKFYDSRYIDIRTGEIATGKELFNGRINRSHKKDSENLHKYRGKRIRKGYRALRRKKVALNPGDLVSLNGEILTVHGTHTKKNGSVNVEFKTPSKSGKKSTSLKKLKIIKTISPMRSAWDKVS

SEQ ID NO: 21319 - protein, 323 aa, unidentified
TRYRAPRFDNRIRTKRKGWLAPSVENRINAHLSRIETVIRLLPVTKISVETTSFDMQLLKNSDIAGKEYQESEQLGFWNVREYVLFRDGHVCQHCHGRSKDPVLNVHHLESRRTGGDSPGNLITLCETCHKELHRGEITLKAKRGQSFRAETFMGIMRWEVLDRLKASHPKLEVQNTYGYRTKHARIVNGIAKSHCADAFCIAGNLGAERLGEFLFQKQTRRNNRQIHKLSILKGGIRKRNQVPFEVKGFRLFDKVACKGEEGFIFGRRSSGYFDVRKLDGTRISAGISYKKLRLLEKRQTYLTEIRKEEALPPLPEGRGLRA

SEQ ID NO: 21320 - protein, 425 aa, Nodularia sp.; identical to SEQ ID NO: 3165

SEQ ID NO: 21321 - protein, 447 aa, unidentified; identical to SEQ ID NO: 3915

SEQ ID NO: 21322 - protein, 393 aa, unidentified
VVCGNPFTIRLMYGVDPCTQGFILGIDPGRTNIGVTVAAADGTCVFSAKAETNNKDVPKRMKERKAHRQASRQGERKRRQRRARKNGTCFGERKRILPGCKEPITNHYITNTEARFMNRARTKGWLTPTANQLLQSTISLVRKVCKFLPVTDVVLELNEFAFMAMDDPGIQRWEYQKGPLYGYGSVEAAVYTQQDGHCIFCEQAIAHCHHVIPASEGGSDTLENRAGLCGGHHDLVHKEQSWTDKLAELKAGMNKRYAALSVVNQIIPRLADELGKMFPGHAFATNGWSTKQFRDAHGIPKDHNTDADCIACSILENPTIKLPEKVYELRKSGGTTELRYPVWRTATTTCPEQTRKPASPKRSWPPRTGINAPSKRPTAWRNSGQLIPMMWGG

SEQ ID NO: 21323 - protein, 442 aa, unidentified; identical to SEQ ID NO: 2903

SEQ ID NO: 21324 - protein, 304 aa, unidentified
LAPSVENRINAHLSRIEAVLRLLPVTKITVETASFDLQLLKNPDISGKEYQEGEQLGFWNIREYVLCRDGHVCQHCYGRSKDPVLNVHHLESRRTGGDSPGNLITLCETCHKALHRGEITLKAKRGQSFRAEAFMGIMRSEVLNRLKASHPELEVNNTYGYRTKHARIANDIAKSHCADAFCIAGNLGAERLGEFFFQKQTRRNNRQIHKLSILKGGIRKRNQAPFEVNGFRLFDKVACKGEEGFIFGRRSSGFFDVRKLDGTRISAGISYKKLHLLEKRRTYLTEIRKEEALPPLPEGRGLRA

SEQ ID NO: 21325 - protein, 440 aa, unidentified; identical to SEQ ID NO: 16550

SEQ ID NO: 21326 - protein, 465 aa, unidentified; identical to SEQ ID NO: 8068

SEQ ID NO: 21327 - protein, 277 aa, unidentified; identical to SEQ ID NO: 16282

SEQ ID NO: 21328 - protein, 518 aa, unidentified
MTPKKRKEASRMSEYIYVLGMDGDPQMPTKRKRHVEKLLQAGRARVFRQIPFTIQLTYENKPVLQPVTIAEDPGRSNIGMAVVSLSGELLSAAVVQTRNKEIVKLMEKRKQHRRASRNGERKARQRLAKKCHTMIKTGFLMRKLPMYGKDKRVRCNVIKNTEAKFCNRKREDGWLTPSAEHLVRTHINLIHKMQKFLPITDVAIEINRFAFLSLEDPSISGVDFQNGPLKGYDDLNVAIEDLQDGHCLMCNSPIEHRHHIVPRSMQGSNTIGNIAGLCCKCHERVHKDARFEDRLKKKKAGLNKRYAAVSVLNQAIPFICKRLEQEFGKEHVHYCSGRDTSMVRRSLGYHKTKEEQLHEVDAWCIAVLSLQHVPEKAPEFDHVHEILQFRRQDRSRIKAQTSRAYYHEGKKIAKNRKKAEGQKDDSLQGWRKRQVERYGEEQTRKMISQLKVKKSIRRYNRLDRLMPGAVFYYQGVRYVMRGQHSNGQYLQAVGMRDKDFPAKKCKIVVHNQGLVFVS

SEQ ID NO: 21329 - protein, 430 aa, Microcoleus sp.
MQNYTFVLDTNKRPLDPVHPAMARKLLSNGEAAVFRRYPFTIILKRGVDTPTQSMAPCPASYEIKLDPGSKTTGIALLKGEKLIFVAELNHRGQAIKASLDSRRAIRRGRRARHTRYRQARFLNRARPKGWLAPSLKHRVDTTLTWVNKFIRFAPINSIAMELIQFDLQQLENPEISGIEYQQGELLGYEIREYLLNKWDRKCTYCKAENSPLQVEHIHPKARGGSNRISNLCLACEKCNLKKGTQDIKDFLSKKPNLLKQIMIQVKRPLKDATAVNSTRWALFNQLKLTGLPVTTGSGGQTKYNRTRLELPKTHYFDAACVGKVHKLIVSTTQPLSIKANGHGTRQMCRTDKFGFPSRYLPRNKFVKGFQTGDIVKAVVTSGNKIGEYVGRVAVRSSGSFNISGKKLVEGVNHKYCQIIQRKDGYSYQL

SEQ ID NO: 21330 - protein, 465 aa, unidentified
MSTCVCVLSNSGERLMPTIRLGKVRRLLKDGKAKIIKHHPFTIQLLYDSKANTQPIEICEDVGYNYIGISVKSESHEYVSAQYDTLQDEKEHHDDCRKYRRTRRNRLRYRKPRFDNRKRDDGWLAPSLEHKKQLNIRLIERYVSVIPITHATVEVGSFDTMLVKAIEEGKATPESADYQKGPRYNLATLREAVFYRDNYICKVCGRKATEGAILHMHHMFYWKGRHGNSLSELITVCEKCHTPANHQKSGKLYGFGENVKFADLSGAAFMNTVRWQIVNELYAAFGKDFVTVTYGAMTKEKRIALHLDKSHNNDAYAMGSFHPADRCAFERYEKVKRNNRILEKFYDSQYIDTRTGELTNGKSLFNGRISRSHKKDSENLHKYRGKRICKGHRALRRKKLALNPGDLVSLNGEILVVHGTHTKKNGSVNVEFKTPSRGGKKSTSLKKLKIVKTSNLMHSAWTKVS

SEQ ID NO: 21331 - protein, 477 aa, unidentified; identical to SEQ ID NO: 14065

SEQ ID NO: 21332 - protein, 447 aa, unidentified; identical to SEQ ID NO: 5937

SEQ ID NO: 21333 - protein, 480 aa, unidentified
VDHRPSGREAVRAKLCFAGTGMRKHNKKRRHRMVAVLSKTGIRLMPTSSYRARKLLAKKKAVICGYRPFTIRLTERETGGVQPVELAVDTGYFHVGNSLKTAKHELAAVEIRTLMDEKQRYDDRRQYRRMRRSRLRYRAPRFDNRRRPEGWLAPSIQGRMEQNLVFLRRVLSVVPVTRIVMEMGQFDTQVLKAVEEGRPLPEGADYQQGERYGIATLREAVFTRDNYTCQCCEKTIHDGVTLHVHHIVYRSQGGTNRMGNLITVCEKCHTPKNHKPGGKLYKWKPTVKSFKGATFMTAVRWIVYRSVKECFPDVDVRITYGAKTKLQRRALDITKSHVNDAYAMGDFHPKHRTRLVILQKKRRNNRILEKFYDAKYIDTRDGSKKTGQQLFNGRTNRNHNTDTENLRPYRGTKLSKGKRAIRTTRYRIQPHDILVYQGQEMEASGCHCKGTRVMTTAKKSLPIGKVRVRRYSGGYYAVAE

SEQ ID NO: 21334 - protein, 407 aa, unidentified
MVYVQDINGNPLMPTTRHGKVRRLLKNNKAVVVNLCPFTIRLTYETTNYKQEITLGVDTGTKHVGLSATTKSKELYSSEVILRSDIVDLLSTRREQRRTRRNRLRYRKPRFYNRVGANKSNWIAPSIQQRIDSHIKIVSDVYKILPVSKLIIEVAQFDTQKIKNPDITNIEYQQGDQLGFWNVREYVLTRDNHKCQHCKGKSKDKILNVHHIESRKTGGDSPSNLITLCETCHNEFHKGNIDLKVKREKSLRDAAVMGIMKWRLYEIPKSTLPNVSMTFGYITKYNRIHNDIEKSHVSDAFVISKNFNAKRLNFSYKIKLVRRHNRQIHKMKIPKGGTKRPNQSPFEIFGFRLFDRVRFDSKFYFIYGRRKTGSFNIRDINGENKKDVIYKKLKLSRCKRFMIQIEM

SEQ ID NO: 21335 - protein, 365 aa, unidentified
MPDKVYVISRLGHPLMPCSPAKARHLLDDKKAKVVKRMPFTIRLLYGSTKYIQPIILGVDAGSKTIGLSASTAKEEVFAAEVMPRNDVVENLSTRREFHRARRNRTTRYRKPRSDNRVRSNHERWLAPSVKVKIQEHITSIKRVCTILPISKVVIETAEFDLQLLKAIQEGKPIPEGEDYQKGEMYGSYNVCQYVLWRDNYTCICCGVRGTPKNPVRLHSVDKYYRLARGYNWFEDEQPSDEIKEKVERVLSERDWKIDVVLSHTCPLRYEPAEVFLSMIDQSSVDKSTEQWLGTIESRLHYERWFCGHYHTDKEIDKIRFMFQDYTMLPHQISLSAEKEMIRRMQRQAEIVEALGLMDEAQEEK

SEQ ID NO: 21336 - protein, 427 aa, Microcoleus sp.; identical to SEQ ID NO: 13117

SEQ ID NO: 21337 - protein, 425 aa, unidentified; identical to SEQ ID NO: 14294

SEQ ID NO: 21338 - protein, 512 aa, unidentified
MATVHVLNKDGKPLMPTTRGGHVRHLLKEQKARVVRTKPFTIQLLYETDDVVQHLYLGIDPGRTNIGVAVVKTDGTAVFTAHLETRNKEIPKLMKKRKDSRRARRTNGRRCRRQRRAKANGTISKKCVKQTTAQNGSVSKRAKEIGVIKRHLPGCEKEVLCIGIKNKEAKFSNRVKPEGWLTPTANQLLQTHINLVKKIQKFLPISDVVLEVNKFAFMQLDNPNIQKWQYQQGPLYQKASLEEAVSEMQEHHCLFCKKPIDHYHHVVPQHKNGSNTIGNIVGLCAKHHDLVHKDTTWQKKLAKKKTGLNKKYGALSVLNQIIPTLTKELSSLFLKHFFVTNGKSTYDYRAAHGVSKDHWLDAYCIACSVLPNDTCDKTINSRVPYEFKQFRRHDRRALNNENMSRVYTFNGKMVATNRHKATEQTTDSLEEFRQRQPNDVCNLKVKEHHPTYRNMNRNYPGSVFLIGKQVHVMQGIAGSKDGEATTYKDTNANSIAAGKCKFVAKNSGILFV

SEQ ID NO: 21339 - protein, 453 aa, unidentified
MLMAVAVVSRTGVPLMPTSPYRARKLLASGKAEKYGYDPFTIRLTERETGDTQPVELCMDTGYIHIGVSVKSEKHEYLALQIDTLTDEKKKHEKCREKRRNRRSRKRYRKPRFDNRKRDKGWLAPSLEHKKEIHVRAAERICRVVPVTDITMEMGNFDTQVLKAKEEGRPLPQGTDYQQGERYGTATLREAVFSRDNYTCLCCGRTMKDGAYFHVHHIRYRSQGGTDRMANLATVCEKCHTPANHQPGGKLYNWKPEIKSFKGATFMTAVRWQMYREIKEKIPDVSVHLTYGAATKERRRALDIEKSHVNDAFVMGRFHPGHRARPELYIKKRRNNRVLESFYDARYIDSRDGKRKPGKELFNGRISRNHKKDSENLHKYRLRKVSKGKRCIRKKHYLIQPHDILVYCGRKYETAGCHNLGTGAILLPERRSIAVSKLKIYRYSGDYYKAAFN

SEQ ID NO: 21340 - protein, 415 aa, unidentified
MVYVLDKDGHPLIPTNRHGKVRRMLKSGQVKVVKKCPFTIQLMYESEHNVQPVSLGIDAGSKRIGVSATTKTTVLYEADVELRDDIVKLLATRRQMRSFRRSRKTRYRPKRFDNRRRGKGWFAPSIRQKMNTHLVTVARVCEILPVTQIIVETASFDIQKIKNPKIQGVEYQRGEQTDFWNVREYVLFRDGHVCQCCKGKKKDPILNVHHIESRKSGGDAPNNLITLCETCHKGYHNGTIKLPKRIKRGMKFKDAAFMGIMRWTFYNTLKEKYEPDIPVSMTYGYLTKNTRIQHNLPKEHYIDARCISGNPDAKSDGVYYYQKKIRCHNRQIHKFNTLRKGVRKLNQSEYLVKGYRIFDKVRYQGKEYFVFGRRKTGFFDIRTLSGEKANNGSLSIKKIAFVDTRKNYITERRTV

SEQ ID NO: 21341 - protein, 419 aa, unidentified; identical to SEQ ID NO: 5677

SEQ ID NO: 21342 - protein, 512 aa, unidentified; identical to SEQ ID NO: 5549

SEQ ID NO: 21343 - protein, 518 aa, unidentified; identical to SEQ ID NO: 5766

SEQ ID NO: 21344 - protein, 438 aa, unidentified
LKENKASVVCRHPFTIHLWYKTGCATQEGSIGIDTGSQHIGVGVTCGDKVILKDEHELRSSMEKRSLMETRATMRRGRRYRKVRYRKPKWRHHTKRMYFEKANRKGQHWRKVKTTTQSPRPERWLPPSLQSKCDHHFRIIDRYLKYLPDSITKNLVIEVGRFDMAHMNDPTIHGEMYQRGPMYDTENLRAYIFARDGYKCACCKAKAGSIRKKDGTSVKLVAHHIQFRSRGATDNPKYMISVCDHCHTTKAHQLGGILYSWMETNKKVTRGLRDATFMNILRRRLFDGYPQAAFTYGNITAVDRKRLLLPKSHANDAVAISLFGKDVSVINATCQTLRYKQVRKSKRSLHEATPRKGRKEPNTKAIRNKKNTTHVNGFKLWDSVLVNGQKLFICGFTGSSAYLVDQDGHYVSPPGKTYKQWTLSKLSRLHPNGNWLMA

SEQ ID NO: 21345 - protein, 420 aa, unidentified
MQYVYVLSKHGEPMMPCSPGKARLLLKEKKARVVRRTPFTIKLLYGSAGYKQPITLGVDAGSKHVGLSASTEKRELYREEFTPRNDVIKLLSKRKQYRRSRRNRKTRYRAPRFNNRVHSKHKGWLAPSVEVKIQEHITVIKRICRILPISLVRVETAEFDTQRLKAILEGKSLPVGTDYQLGEMYDEYNVRQYVLKRDNYTCQCCGAHTTKKKTVKLHVHHLEGRQVGGNAPNNLITLCVDCHKALHAGKVKLDGKKRGKSFKDAAFMGIMRKTLMARLSKELPIPVQGTYGYITKMLREQNDIKKSHVNDARCISKHPLAEPCSACYRTKAIRHHNRQTHKANFSKKGIRERSQTPYVVEGYRLWDKVLYKGQECFISGRRTSGSFALKRLDGTSISESVTFKKLRLLEPATNYLIERM

SEQ ID NO: 21346 - protein, 408 aa, unidentified; identical to SEQ ID NO: 6795

SEQ ID NO: 21347 - protein, 434 aa, unidentified; identical to SEQ ID NO: 7534

SEQ ID NO: 21348 - protein, 421 aa, unidentified; identical to SEQ ID NO: 14103

SEQ ID NO: 21349 - protein, 447 aa, unidentified; identical to SEQ ID NO: 5316

SEQ ID NO: 21350 - protein, 406 aa, unidentified; identical to SEQ ID NO: 2752

SEQ ID NO: 21351 - protein, 416 aa, Chamaesiphon sp.; identical to SEQ ID NO: 18515

SEQ ID NO: 21352 - protein, 408 aa, unidentified
MVYVQDIDGKPMMPTTRHGKVRRLLKANKATVVNLCPFTIRLTYATSGYKQEIVLGVDAGTKHVGLSATTKSKELYSSEVILRSDIVELLSTRRELRRTRRNRLRYRKPRFGNRVKSKHHGWVAPSVRHKVDAHIRVIDNICSTLPISRIIVEIAQFDTQKIKNPDISGNEYQEGDQLGFWNVREYVLARDGHKCQHCKGKSKDPILNIHHIESRKTGGDSPSNLITLCETCHKEYHKGNIDLKVKRGKSLRDAAVMGIMKWKLYEELKSRYPNVSMTFGYITKYNRIKYGIEKYHISDAFVISKNFNALRLEYHYKVRLVRRHNRQIHKQKVLKGGAKKPNQSPFEVFGFRLFDRVMFEGNYYFIFGRRKSGSFNIRDINGGNQRNVTYKKLKLSIGKRFMIQKEMN

SEQ ID NO: 21353 - protein, 423 aa, Arthrospira sp.; identical to SEQ ID NO: 9953

SEQ ID NO: 21354 - protein, 432 aa, unidentified; identical to SEQ ID NO: 3304

SEQ ID NO: 21355 - protein, 388 aa, unidentified
LRDSMSKRKLMQSRASSRRGRRHRKTRYRHPKWRPKAKRVYCEIPDRKGRHWKKKDITFTSKRPKGWLPPSLQSKTDHHIRWIKKLQELLPEGYRLSIELGRFDPARLKDPEIHGELYQKGPQYDYENVRAYVLDRDRYTCQVCGKKGGKLHVHHILYRSHGATDDPQYMTTVCSGCHNTENHQQGGILYQWMQKQKKFTRGLRDATFMNILRKRLIEAFPGATFTYGNITKADRERLILPKSHGNDATAIAIVKTGIMTVKDKEPVIYIQQVRRKKRSLHEETPRKGRKEPNRKASRYDKNTKAVTVTKRKNKKKITITGCLFDRVELNGKKGWISGFTDKSCYVKDENDQYIRTSPKYKQVSLSKLKILHHCGNWAIGAKRSLGKG

SEQ ID NO: 21356 - protein, 470 aa, unidentified; identical to SEQ ID NO: 2949

SEQ ID NO: 21357 - protein, 387 aa, unidentified
LIRKGRAKLKSKYPMVIQLEKEVKSDEDDESHMVCGIDDGSTHVGLAIVQKCLTKNKVVFKGTIEQRQDVKHLMDVRRGYRRYHRYHKRYRQARFNNRSSSKRTCRLAPSIKQKKDAILRVLYQLNSWIDIQEYYLEDVCIDIRAMTDDYKPYRWQYQKSNRLDENLRKATILRDGCRCQECGKSNCILEVHHIRARRYGGANTIGNLITLCKKCHDKTESREKDFEERYFNMIKSKPKRFDYAMHVMQGKTYLREKISELGILHLTNGGETANKRIEWNIVKSHSNDAICIADGIPDTCDIKEWIIKPMRRKSKAKTDNVLGIKHRDLVSYTYKSGETHTGYVTALYPEQLALNFQSKTKHCKKVNARKCRLLWKFNKIYWLEQCV

SEQ ID NO: 21358 - protein, 431 aa, Calothrix sp.
MEGLMSKIFVLDTNKKPLDQIHPAQARQLLRNKKAAVFRRFPFTIILKNSCPDVSVSPLRLKIDPGAKFTGIALVNGSTGEVVFAAELKHRGFAIREALTSRRQLRRSRRARKTRYRKTRFLNRTRPDGWLAPSLQSRIENIKTWVERLRKLAPIAAISQELVRFDMQLMRNPDIQGKEYQQGTLAGYETREYLLEKWNRQCAYCGVKDVPFQVEHIHPRAKGGSNSITNLTLSCEECNTKKGTKDIKEFLKKDASKLEKILKQARRPLADAAAVNTTRWALFRALKETGLPVETGSGGLTKFNRSQQKLAKTHWIDAACVGESTPLLNIKGIRPLLIIANGHGTRQMCGTDKFGFPSRHRTNKQIHFGFQTGDIVKAVVTKGKKIGKYVGRVLCRATGSFDIATKTGRISGISHKYFLATHKKDGYSYSI

SEQ ID NO: 21359 - protein, 427 aa, Nostoc sp.; identical to SEQ ID NO: 2670

SEQ ID NO: 21360 - protein, 422 aa, unidentified
MVVYVISKSGNQLMPTTPARARKKLESGRAKCIRREPFTIKLTYESGEAAQPLCLGVDTGSDKLGSAVVDEDNNVYYMSEVQVRNDIAEKMKQRSKYRRNRRNRKTRYRKPRWNNRKNSIRKDRFSPTMRSKIESHVKEVNFVKSILPIAEVIVETGTFDPHALKNPDVLKNKWLYQRGTNYGYANTRAFVLHRDEHVCQHCKGKSKDNRLEVHHIQFKSEQGSDDVENLITLCKNCHNEVHKLVIKLNVKGKVKGMLKHATQMNSIRVQLLRIVNCRKTFGYITKEHVWAMELTKEHYNDAIAIACLNNIERDGSVDLAFKTDRVIYKKCVPYRDMQKNKGVRNEQHIPTGKIQGFRKFDKVLYNSKDYFIKGRMSTGYAILMDITGKEVKLKPIPKFTKMKRLEARTSWIIQVRTILKTA

SEQ ID NO: 21361 - protein, 408 aa, unidentified; identical to SEQ ID NO: 8232

SEQ ID NO: 21362 - protein, 512 aa, unidentified; identical to SEQ ID NO: 14939

SEQ ID NO: 21363 - protein, 406 aa, unidentified
MVYVQDINGKPMMPTTRHGKVRRLLKENKAVVVNLCPFTIKLMYVTSDYKQEIVLGVDAGTKHVGLSATTKSKELYSSEVILRNDIVDLLSTRRESRRTRRNRLRYRKPRFDNRVKNKRQGWIAPSVRYKVDAHIRVIDNVCSILPISRIVVEVAQFDTQKINNPEISGKEYQEGDQLGFWNVREYVLARDGHKCQYCKGKSKDAILNVHHIESRKTGGDSPSNLITLCETCHKEYHKGNIDLKIRRGKSLRDAAVMGIMKWKLYEELRSRYDRVSMTFGYITKHNRIKYGIEKSHTSDAFVISKNINAKRIGCQYLKRLIRRHNRQIHKMKILKGGKKKNNQAPFEVFGFRLFDKVLYNNKICFVYGRRKSGSFNIRDFNGENSKDVSRKKFKLIRGKRHPIILK

SEQ ID NO: 21364 - protein, 401 aa, unidentified
MEKVYVQDKNGKPLDPTNQARARKLLDKDRAEVVQREPFTIKIVDRKKENSYTRDVTLGIDAGYKKVGFSAVNEDEELINGVLELRTDISKKLEQRASYRRNRRHRNTRYRQPRFDNRKKEKGWLAPSIKHKMNSHIRLIDKLKEILPITKIIIEVAKFDQQKIQNPEISGVEYQKGTLQGYNIRNYLLEKYDYQCVYCGKKDTPLEIEHIVPKSRGGSNRVSNLAISCVDCNQRKDNQTAEEFGFPKIQEQAKEPLKSTAFMNIVRWKLVNELNCGYTFGHITKKNRIEQSLEKTHYNDAFIIAGGKDQKKCRPINTIINRRNNRSVQTNRKRYGVSIRRHKYPLSPGDLVKYKGGSFKVKGMFNYGKWVRMENVDGDTVNSNVKKTELMKYGKGLCFAC

SEQ ID NO: 21365 - protein, 432 aa, unidentified; identical to SEQ ID NO: 17529

SEQ ID NO: 21366 - protein, 421 aa, unidentified
MLVFVKNKHGENLMPCKPSKARKLLKQKKAKIISYKPFTIQLLYGSSGYKQPVTLGVDLGSKHIGIAVTSEDKVLIKGEIELRDDIKENLDIRRQYRRSRRYRKTRYRKPRFNNRKRPEDWLPPSIQSRIDNTFRWIDNFINLLPSPKLCIEVGKFDVQKMMNSDIEGVEYQQGETYGYHDVRYYVFARDNYTCQVCKKKGKILQTHHIVYKSKGGTDRPSNLITVCTDCHTHKNHQEGGIFYKWMMEKKKMPSYKETPLMNIMRRRVFEKYPEANIVYGSYTTIRRKELGLEKTHYNDAIAITGIESIKHNPDNYFKIKQFRKKKRSLHEAMPRKGRKEPNRTQKRNSKNTKYRNGFYLNDKVKVFGKVGFITGFTNGGAYIQDIEGNYITIPNKSYKQVSFKYIEFINHNNNWQFISHL

SEQ ID NO: 21367 - protein, 431 aa, unidentified; identical to SEQ ID NO: 4463

SEQ ID NO: 21368 - protein, 396 aa, unidentified
VVRRTPFTIQLTIATGESKQPVSLGVDAGYKHVGLSASTEKAELYASEVELRKDITDLLSARRALRQSRRNRKTRYRAPRFDNRIRTKRKGWLAPSVENRINAHLSRIEAVLRLLPVTKITVETASFDMQLLKNPEISGKEYQEGEQLGFWNVREYVLFRDGHVCQHCYGRSKDPVLNVHHLESRRTGGDSPGNLITLCETCHEALHRGEIALKTKRGHSFRAEAFMGMMRWEVLNRLKASHSELEVNNTYGYRTKHARIVNGIDKSHCADAFCIAGNLGAERLCEFFFQKQTRRNNRQIHKLSILKGGIRKRNQAPFEVKGFRLFDKVACQGEEGFIFGRRSSGSFDVRKLDGTRISAGISCKKLRLLEKRRTYLTEIRKEEALPPLPEGRGLRA

SEQ ID NO: 21369 - protein, 408 aa, unidentified; identical to SEQ ID NO: 3192

SEQ ID NO: 21370 - protein, 408 aa, unidentified
MKVYVRNQDGAPLMPCTPAKARKLLRAGKARVAARSPFTIQLGWQCEGQVQDVVVGIDKGSSVTGISCVGNGTVLLAAEIHHRRDVKEKLDTRRAHRRSRRNRKWYRPRRFLNRASSTRSGRLPPSIKTNVEEVIRVVRQLPLPISKIVVEDVQVDIARLNDPTLAGSRYQDPTRLDENLRIACLMRDGYTCRHCGKRNCRLEAHHVVYREHGGKGTLANLLTLCEACHEKVHAGTITLQVTGASGRLDQIAQRSMQGKTYLYASLGASAPFVTVFGYETSAFRKRRGLAKTHTIDALCVATLGSGEIVTPECPNTYRIAFRPRQTRRQYHDLPRKGQGRVRYQVNEELAGFRKGDIVRVKGRWVKQINSIYSNGYVAFKRVPGEPTTARPRDCRLLERGRTVVWSHQ

SEQ ID NO: 21371 - protein, 493 aa, unidentified; identical to SEQ ID NO: 2644

SEQ ID NO: 21372 - protein, 395 aa, unidentified
VKSESHEYVSAQYDTLQDEKEHHDDCRMHRRTRRNRLRYRKRRFDNRKRDKGWLAPSLGHKKQLNISLLEQYVSVIPITHATVEVGSFDTMLLQAIQKGEAKPEGVDYQKGPRYNLATLREAVFYRDDYTCQVCGRKITDGAILHMHHMFYWKGRHGNSLSELITVCEKCHTPANHQKGGKLYGFGEDIKFANLSGAAFMNTVRWQIVNVLYAAFGKPFVTFTYGAMTKEKRIALHLEKSHNNDAYAMGSFHPVNRCAFEHYEKVKRNNRILEKFYDSQYIDTRTGELTNGKSLFNGRISRSHKKDSENLHKYRGKRICKGHRALRRKKVALNPGDLVSLNGEILVVYGTHTKKNGSVNVEFKTPSRDGKKSASLKKLKIVKTSNLMHSAWTKVS

SEQ ID NO: 21373 - protein, 536 aa, unidentified; identical to SEQ ID NO: 2718

SEQ ID NO: 21374 - protein, 423 aa, Arthrospira sp.; identical to SEQ ID NO: 3735

SEQ ID NO: 21375 - protein, 472 aa, Solobacterium sp.
VVGNRLLSIKPLINIGEGVIYSSICTGLSLQTYQKRKEVPCMVYVLDINGQPLMPTTRHGKVRRLLNSHLAKVVKRCPFTIQLLYQSTKEIQPVSLGVDAGSKHIGMAATTEKKVVYQEELSARNDVVKLLSARRTLRRTRRNRKTRYRKPRFNNRVHSKHKGWLAPSVEVKIQEHITTIKRICQILPISEIQVETAEFDLQRLKAMEEGRTPPVGTDYQLGEQYDFYNTRQYVLHRDGYTCQCCGTHDNNIKLHVHHIESRQTGGDAPNNLIILCEHCHKALHEGKLELPKGKKRGKSYRDATFMGVMRKTLLERLKKEIDVPVEGTYGYITKYWRERAGLEKSHIHDAVCISQYPYAKPLDIYYLTKTVRHHNRQIHKSNFSKGGIRKRNQAPYLVKGFRLFDKVLYQGKEYFIFGRRATGYFDIRTLDGTKVNKGSISYKKLRIQDTAKAYLKEARAIPHMDKFTCVLA

SEQ ID NO: 21376 - protein, 448 aa, unidentified
ILKTCFAAFNLAKVVVLMDAWDIIVILNKRGKPLMPCSPAKARLLLKEKKAVVVRRTPFTIQLTIATGETKQPVSLGVDAGYEHVGLSASTEKAELYASEVELRQDVSDLLSARRALRQSRRNRKTRYRAPRFDNRIRTKRKGWLAPSVENRINAHLSRIETVLRLLPVTKITVETASFDMQLLKNPDIAEKEYQEGEQLGFWNVREYVLFRDGHVCQYCHGRSKDPVLNVHHLESRRTGGDSPGNLITLCETCHKALHRGEIKLRAKRGQSFRAETFMGIMRWEVLNRLKASHSKLEVNNTYGYLTKHARIKSGITKSHCSDAFCIAGNLGAKRLGEFLFQKQTRRNNRQIHKLSILKGGIRKRNQAPFEIKGFRLFDKVACKGEEGFIFGRRSSGSFDVRRLDGTRISAGISYKKLRLLQKRQTYLTEIRKEEALPPLPEGRDLRA

SEQ ID NO: 21377 - protein, 428 aa, unidentified; identical to SEQ ID NO: 5055

SEQ ID NO: 21378 - protein, 411 aa, unidentified
MVYVQDIDGKPMMPTTRHGKVRRLLKDNKAVVVNTCPFTIKLTYKTSDYKQEIVLGVDAGTKHVGLSATTKSKELYASEVILRSDVVDLLSTRRGLRRTRRSRLRYRKQRFNNRVKSKKDGWIAPSVRHKIDSHIRIISFVYSILPVSKLIIEVAQFDTQKIKNPEISGKEYQEGEQLGFWNVREYVLARDGHKCQHCKGKSKDPILNIHHIESRKIGGDSPSNLITLCETCHKEFHKGNIKLKVSRGKSLRDAAVMGIMKWKLYEELKSKYDNVSMTFGYITKYNRINHGIEKSHVSDAFVISRNFDSERLGYYYKLKLVRRHNRQIHKMKIPKGGKKRMNQSPFKVFGFRLFDKVMFQGEERFIYARRLSGQFKIKDIDGNNERNISYKKLRYVSHGLISIKTNLFLSQ

SEQ ID NO: 21379 - protein, 416 aa, unidentified
MTNNINNNQYSFVIDSKNNKLSPCKINKAWYLIRKGKAIQINKYPMTIQLKKEIKDKQDNSEFICGIDDGSSHVGIAIVQKCESKNKVFFKGTIEQRKDVKHLMDVRRGYRRYKRNHKRYREARFNNRSASTRKGRIAPSILQKKQSILRVINRLNKYINITEYHLEDVAIDIRALTEGHKLYKWQYQKSNRLDENIRKAVILRDNCKCMECGKSNCILEVHHITPKRLHGDNNLNNLITLCSNCHQKTEEKEELFIDRYYKMINGKNIRFDYAQHVMQGKTYLRKELSKLGKLFLTTGGDTANKRIDWDIIKSHSNDAIVITDLKVDADDCNIKDWIIKPMRRQSKANIDELQGFKHRDLIKYTKRNGENYIGYITSLMPETRTLSFTTLNNKILKRYGIKSCKLIWRFNKIYWL

SEQ ID NO: 21380 - protein, 509 aa, unidentified
VYVLNKDGKPLMPTTRCGHVRYLLKEKKARVVKTKPFTIQLLYETNDVVQPLYLGIDPGRTNIGVAVVKADGTAVFTAHLETRNKEIPKLMKKRKDSRCARRTNGRRCRRQRRAKANGTISKKCVKQATAQNGSASKRAKKIGVIKRHLPGCEKEVLCIGIKNKEAKFNNRTRPAGWLTPTANQLLQTHINLIKKIQKLLPISDVVLEINKFAFMQLDNPNIQKWQYQQGPLYQKANLEEAVSEMQEHHCLFCKKKIDHYHHVVPQHKNGSNTIDNIVGLCTKHHDLVHKDTAWHEKLTKKKTGLNKKYGALSVLNQIIPALTKELSSIFPKHFFVTTGKSTYDYRAAHGVSKDHWLDAYCIACSVLPNDVCDSSINNRVPYELKQFRRHDRRALHKENMSRVYTLNGKKVATNRHKATEQTADSLEEFRQNHPDDVCKLKVKENHSEYRNPKRNFPGCVFLVGKRTHVMQGTSGSHNGKADGYYDTNGNSYSSGKCKFVAKNEGIIFA

SEQ ID NO: 21381 - protein, 412 aa, unidentified; identical to SEQ ID NO: 4932

SEQ ID NO: 21382 - protein, 428 aa, unidentified
KVYVINKHGRPLMPCSPAKARHLLDAGKAKVKKRTPFTIQLVYGSSGYTQEVILGVDAGSKTIGVSALTKKEELFAANVIPRNDVVDLLSTRREFRRARRNCKTRYRKPRFDNRVRSKHKGWLAPSVEVKIQGHITAIRRVCGILPVSKVVVETAEFDLQLLKAIEKGKPVPQGEDYQQGEMYGHYNVRQYVLWRDDYTCQCCGAHTTKKKEVRLHVHHLESRKTGGDAPSNLITLCDSCHEKFHKGLIAEKDFKKRKRRSTWDATFMGIMRKTLMQRLCSELPIHVVETRGYITKATREKLLVLPKSHINDALAIAQGKHGFNVGYLPGILQIDMIYTIRPVRHHNRQLHKATILKGGIRKSNQTEKYVFGYRLFDKVQFNGQDCFIWGRRTTGIFTIKTINGKMIKDGISFKKLKPVEKSTSYLIA

SEQ ID NO: 21383 - protein, 411 aa, unidentified; identical to SEQ ID NO: 3917

SEQ ID NO: 21384 - protein, 414 aa, unidentified
MPCSPAKARLLLKEKKAIVKRRTPFTIQLTIATGETKQPVSLGVDAGYKHVGLSASTEKAELYASEVELRQDITDLLSARRALRQSRRNRKTRYRAPRFDNRISTKRKGWLAPSVENRINAHLSRIEAVLRLLPVTKITVETASFDMQLLKDPDISGKEYQEGEQLGFWNIRDYVLFRDGHVCQHCHGRSKDPVLNVHHLESRRTGGDSPGNLITLCETCHKALHHGEITLKTKRGQSFRAEAFMGIMRWEVHNRLRALHPGIEVSNTYGYRTKHARIANGIAKSHCADAFCIAGNLGAERLGEFFFQKQTRRNNRQIHKLSILKGGIRKRNQAPFEINGFRLFDKVACKGEEGFIFGRRSSGSFDVRKLDGTRISAGISYKKLRLLQKRQTYLTEIRKEEALLALPEGRSLRT

SEQ ID NO: 21385 - protein, 421 aa, unidentified; identical to SEQ ID NO: 4235

SEQ ID NO: 21386 - protein, 457 aa, unidentified; identical to SEQ ID NO: 10736

SEQ ID NO: 21387 - protein, 408 aa, unidentified; identical to SEQ ID NO: 5694

SEQ ID NO: 21388 - protein, 431 aa, unidentified
MPNKVYVINKHGRPLMPCSPAKARHLLDAGKAKVKKRTPFTIQLVYGSSGYTQEVILGVDAGSKTIGMSASTTKEELLSAEVKPRNDVVDLLSTRREFRRARRNRKTRYRKPRFDNRVRSKHKGWLAPSVEVKIQEHITAIRRVCGILPVSKVVVETAEFDLQLLKAIADGKPVPQGEDYQKGEMYGHYNVRQYVLWRDNYTCQCCGTHPSKKKEVRLHVHHLESRKVGGDAPDNQVTLCESCHEKLHKGLIAEKDFKKRKRKSTRDATFMGIMRKTLMQRLCSELPIPVVKTRGYITKATREKLLVLPKSHTNDALAIAQGKRGFNVGYLPEIAQIDKIYTIRPVRHHNRQLHKATILKGGIRKSNQTEKYVFGYCLFDKVQFNGQDCFIWGRRTTGIFTIKTINGKMIKDGISFKKLKPVEKSTGYLIA

SEQ ID NO: 21389 - protein, 446 aa, Pseudomonas sp.; identical to SEQ ID NO: 10661

SEQ ID NO: 21390 - protein, 462 aa, unidentified; identical to SEQ ID NO: 8743

SEQ ID NO: 21391 - protein, 450 aa, unidentified; identical to SEQ ID NO: 4205

SEQ ID NO: 21392 - protein, 424 aa, unidentified; identical to SEQ ID NO: 12629

SEQ ID NO: 21393 - protein, 456 aa, unidentified
MSTCVCVLSNSGERLMPTFRLGKVRRLLKDGKAKIVKHHPFTIQLLYDSKANTQPIEICEDVGYNYIGISVKSESHEYVSAQYDTLQDEKEHHDDCRKYRRTRRNRLRYRKLRFDNRKCSEGWLAPSLEHKKQLNIRLIERYVSVIPITRATVEVGSFDTMLLQAIQKGESKPEGVDYQKGPRYNLATLREAVFYRDNYTCQVCGRKIADGAILHMHHMFYWKGRHGYQLDELVTACEKCHTPANHQKGGKLFGFGEDKEFANLSGAAFMNAVRWQIVNALYATYGKEFVTITYGAMTKEKRIALQLEKTHSNDAYAMGDYYPAHRCVFRHYQKRRRNNRVLEKFYDATYIDTRTGNKAKGKELFNGRISRNHKKDSEDLHKYRSKMVSKGRRSIRRQRYAIQPYDTVRLEGKTYITSGCHNKGTRLLIPANGKSKSVAISKVQVVCHAGAWIQII

SEQ ID NO: 21394 - protein, 451 aa, unidentified
VLYTGNLRPHWRRNHNGRYPGLQQSSTKVKRKECLYMVYVLDKNGHPLMPTSRHGKVHRMLKSGQAKVVRKCPFTIQLLYESEHNVQAVSLGIDAGSKHIGVSATTKTTVLYEADVELRDDIVKLLAIRRQMRSSRRSRKTRYRPKRFDNRRRGEGWLAPSIRQKINTHLVTVAHVCEILPVSQIIVETASFDIQKIKNPEIQGIEYQQGEQMDFWNTREYVLFRDGHVCQCCKGKKKDPILNVHHIESRKTGGNAPNNLITLCETCHKGYHNGTIKLPKKIKRGMKFKDAAFMGIMRWAFYNTLKEKYEPDIPVSMTYGYLTKNTRIRHNLPKEHYIDARCISGNPDAVSDGVYYYQKKVRCHNRQIHKFNTLRKGVRKLNQSEYLVKGYRIFDKVRYQGREYFVFGRRKTGFFDIRTLSGEKANKGSISIKKIAFVDTRKNYITERRTV

SEQ ID NO: 21395 - protein, 366 aa, unidentified; identical to SEQ ID NO: 10799

SEQ ID NO: 21396 - protein, 427 aa, unidentified
  source 1..427: note = Selenomonadaceae bacterium UBA7260
MERGENIMVYIQSKNGRPLMPTENHAKVRRLLKAGKARVVKLVPFTIRLLGTSHCYQQPVAAGIDAGSKHVGLSASTAKKELFSAELRPRNDVVGLMSDRREFRRRRRNGLRYRKPRFDNRVHSKHKGWLAPSVEVKIWNHIQGIRLMADILPITTIVVEDAEFDLQRIRAMEDGKPLPEGRDYQQGEQLGHYNVRQYVLWRDGYTCQCCGAHGTDRKPVKLHVHHIESRKTGGDAPDNLVTLCEACHKAYHGKKIDLPIKKRRRKPTRDMVFMGIMRKTLFSRLRAMFPEVEIKETYGYVTKYWREKLGFAKTHTTDAFVIAGNFDAGRIEEQMLIIPKRQHNRKIHKVTVGKGGMRKLNQTPKYVHGFQLFDRVLCNGEEGFIFGRRASGGFDIRKLDGTRINANISYKKLRLLEKRKPLLVAYA

SEQ ID NO: 21397 - protein, 462 aa, Scytonema sp.; identical to SEQ ID NO: 10343

SEQ ID NO: 21398 - protein, 470 aa, unidentified; identical to SEQ ID NO: 2825

SEQ ID NO: 21399 - protein, 257 aa, unidentified
PQGEDYQKGEMYGHYNVRQYVLWRDNYTCQCCGAHATKKKEVRLHVHHLESRKSGGDAPGNLVTLCDSCHEKLHKGLITEDDFKKRKRKSTRDATFMGIMRKTLIQRLRAELTIPVAETRGYITKATREKLLVLPKSHTNDAQAIAQGKQGFNVGYLPGILQIDKIYTIRPVRHHNRQLHKATILKGGIRKSNQTEKYVFGYRLFDKVQFNGQDCFIWGRRTTGIFTIKTINGKMIKDGISFKKLKPVEKSTSYLIA

SEQ ID NO: 21400 - protein, 453 aa, unidentified
MPVAVISKTGERLMPTSEHRARKLLKSGKAIKYSYHPFTIQLTERESGDVQPIELCVDTGYIHIGISVKSEKHEYLAEQIDTLTDEKARHDACRMYRRQRRSRKRYRQPRFNNRKRNDRWIAPSLEHKKSIHIQAILRICKVMPVTDITLEMGNFDTQVLKAREEGKPLPQGVDYQHGERYGITTLREAVFARDGYTCQCCGRAIKDGAILHVHHIVYRSQGGTNRMSNLITVCDKCHTPANHKQGGKLYNWKPKIASFKGATYMTTIRWKLYNEVKALFPDIDIDIHITYGAETKERRRALDIDKSHVNDAFVMGQFHPKHRSKPICYKKKRRNNRCLEKFYDATYIDSRDGKKRSGQELFNGRISRNHKKDSENLHQYRLQKVTPGRRAIRRQHYPIQPHDIIVYNGNKIEVSGCQHKGTRVVFSKTKKSVQISKIKLFKYAGGYSKSVFN

SEQ ID NO: 21401 - protein, 413 aa, unidentified; identical to SEQ ID NO: 7120

SEQ ID NO: 21402 - protein, 420 aa, unidentified
MPNKVYVINKHGRPLMPCSPAKARHLLDAGKAKVKKRTPFTIQLVYGSSGYTQEVILGVDAGSKTIGMSASTTKEELLSAEVKPRNDVVDLLSTRREFRRARRNRKTRYRKPRFDNRVRSKHKGWLAPSVEVKIQEHITAIRRVCGILPVSKVVIETAEFDLQLLKAIADGKPVPQGEDYQQGEMYGHYNVRQYVLWRDNYTCQCCGTHPSKKKEVRLHVHHLESRKVGGDAPDNQVTLCESCHEKLHKGLIAEKDFKKRKRRSTRDATFMGIMRKTLMQRLCSELPIPVVKTRGYITKATREKLLVLPKSHTNDALAIAQGKQGFNVGYLPGIVQINKIYTIRPVRHHNRQLHKATILKGGIRKSNQTEKYVFGYCLFDKVQFNRQDCFIWGRRTTGIFTIKTINGKMIKDGISFKKLK

SEQ ID NO: 21403 - protein, 451 aa, unidentified; identical to SEQ ID NO: 5203

SEQ ID NO: 21404 - protein, 423 aa, Moorena sp.; identical to SEQ ID NO: 2845

SEQ ID NO: 21405 - protein, 504 aa, unidentified; identical to SEQ ID NO: 3854

SEQ ID NO: 21406 - protein, 431 aa, Escherichia sp.; identical to SEQ ID NO: 3801

SEQ ID NO: 21407 - protein, 476 aa, unidentified; identical to SEQ ID NO: 15014

SEQ ID NO: 21408 - protein, 430 aa, unidentified; identical to SEQ ID NO: 4817

SEQ ID NO: 21409 - protein, 447 aa, unidentified
VPAYRIKHITKKEAPYMVYVLVIDGQPLMPTSRHRKVRKLLNSHLAKVVKRCPFTIQLLYQSTKETQPVSLGVDAGSRHIGLAATTEQKVVYQEELVPRNDVVKLLSARRALRSSRRSRKTRYRKPRFNNRVHSKHKGWLAPSVEVKIQEHITAIKRICQILPISDIHVETAEFDLQRLKAMEEGRPLPVGTDYQLGEQYDFYNTRQYVLHRDEYTCQCCGTHDNNVKLHVHHIESRQTGGDAPNNLITLCEHCHKLLHAGKTILPKGKKRGKSYRDATFMGVMRKTLLERLKKEVDVPVTGTYGYITKYWREKAGLEKSHINDAICISKYPYAKPLDTYYLVKTVRHHNRQIHKSNFSKGGIRKRNQAPYLVKGFRLFDKVLYQGKSYFIFGRRATGFFDIRTLNGAKVNKGSISYKKLRIQDTANAYLKEIKAIPHMNKFTCVLA

SEQ ID NO: 21410 - protein, 419 aa, unidentified; identical to SEQ ID NO: 3670

SEQ ID NO: 21411 - protein, 191 aa, unidentified
MVAVVDLFGKPLMPTNEYRARRLLKQKKAKIFGYRPFTIQLTERKSTEIQPIELCMDTGYIHIGISAKSERHEYLGMQIDTLTDEKLKRDDKRQYRRQRRNRKRYRAPRFDNRRRKEGWIAPSLEHKKEIHIDAIQRICKVMPITDITLEMGNFDTHVLKAVEEGKPLPQGSDYQYGERYGIATLREAFIA

SEQ ID NO: 21412 - protein, 415 aa, unidentified; identical to SEQ ID NO: 5047

SEQ ID NO: 21413 - protein, 689 aa, Acrocarpospora sp.; identical to SEQ ID NO: 12145

SEQ ID NO: 21414 - protein, 424 aa, unidentified; identical to SEQ ID NO: 3434

SEQ ID NO: 21415 - protein, 451 aa, unidentified
MSVAVISKTGERLMPTSEHRARKLLKSGKAIKYSYHPFTIQLTERESGDVQSIELCVDTGYIHIGISVKSEKHEYLAEQIDTLTDEKARHDACRMYRRQRRSRKRYRQPRFNNRKRNDRWIASSLEHKKSIHIQAILRICKVMPVTDITLEMGNFDTQVLKAREEGKPLPQGVDYQHGERYGITTLREAVFARDGYTCQCCGRAIKDGAILHVHHIVYRSQGGTNRMSNLITVCDKCHTPANHKQGGKLYNWKPKIASFKGATYMTTIRWKLYNEVKALFPDIDIDITYGAETKERRRALDIDKSHVNDAFVMGQFHPKHRSKPICYKKKRRNNRCLEKFYDAKYIDSRDGKKRSGQELFNGRISRNHKKDSENLHQYRLQKVTPGRRAIRRQHYPIQPHDIIVYNGNKIEVSGCQHKGTRVVFSKTKKSVQVSKIKLFKYAGGYSKSVFN

SEQ ID NO: 21416 - protein, 426 aa, Scytonema sp.; identical to SEQ ID NO: 2766

SEQ ID NO: 21417 - protein, 518 aa, unidentified; identical to SEQ ID NO: 20338

SEQ ID NO: 21418 - protein, 425 aa, unidentified
MLVYVVTKDKQPLMPCTPVIARLLLKQEKAKVKRRDPFTIQLLYETTEYRQDLELGVDTGSGKFATAVRTEQNEIVYLSEVAVRNDITSKMTERRTKRRSRRHRKTRYRKPRFDNRRNSKRKDRFSPTMQSKIHSHVKEIEYIQSILPITRIILETGQFDPHRMKNPALADPNVRHWGYQKGPNYGYENTRAMVLDRDNHQCQCCHGKRKDRHLEVHHIVFRSQGGSDDAKNLITLCHTCHQALHKGKIHLDLEGMGKGTLKYATQMNSIRKQLLRRYSEAVETYGYITKANRLAMDLPKEHYIDACVIATEGRQFTINSLLYRKKCVSAGDFQQYHGERSEIRQTTGKIMGFRKYDKVRYFRKYYFIKGRMSTGYAVLMDVNGDTVKFSDMPWGFKTPKLERMERIQARSTWMVMGEKVTPNIV

SEQ ID NO: 21419 - protein, 308 aa, unidentified
VDSGYKHIGLSATTEKDELYASQVELRQDITDLLSARLALRRSRRSRKTRYRAPRFDNRVASKRKGWLAPSVENRIAAHMSRVEAVMRVLPVTAITVETAAFDTQLLKNPDIAERRTNKANSSDFGTCGNTYCSETDTFASTAAGSTKIRYSMFTTLRADGPEAMRRTISSRCARPVTRLSIEGRSNSKSSEGSRSKQKPSWASCVGRLFERLKKAHPELRVRNTYGYLTKHKRISHGIAKSHCADAYCIADNLGAKRLEGFFFQKANPKAQPADSQAVDPERRIEKEEPGSLRSQRLSSFRQSDLQR

SEQ ID NO: 21420 - protein, 543 aa, unidentified
LTFVSIYVQRVYGRTRRFFQSAALHSGRQARGNIYPAGQTAGVLQKEVRTMAAVYVISASGKPLMPTTRCGHIRGLLNAGKARVVEREPFTIQLKYETPDVTQPLYLGIDPGRTNVGSAVVREDGECVFTAQLTTRNKDVPKLMKARKQFRMAHRRLKRRCKRQRRAKAAETLSQKGEFQRLLPGYEEPILCKGIRNKEARFNNRQRPAGWLTPTANHLLLTHLNMVKKLQKLLPITDVVLEVNRFAFMAMENPSIRRWQYQQGPLYGKGSVEDAVYAQQDGHCLFCGKPIAHYHHVVPQHKNGSETLENRVGLCNEHHDLVHKDRAWDAKMKETKAGLNKKYHALSVLNQIIPALTEQLTAMFPQHAFVTTGKDTADFREDYGIAKEHHLDAYCIACSVLAEPTKVAAPTGKPHRLMQFRRHDRQVCHKENIKRVYLSEGNAVATNRHKAIEQKDDSLEEFRKTHTQQEVSALTVKDHQPVYKDMRRFMPGGVFLFNGKVHTLQRSHGRYKGMPFYYIDTDGSKNHAKGCIFLQQNCGLRWV

SEQ ID NO: 21421 - protein, 548 aa, unidentified
NLLLRQERFIVKEVANMSTVYVLNKDGKPLMPTTRGGHVRHLLKEQKARVVQSNPFTIQLLYKTNDAVQPLYLGIDPGRTNIGVAVVKADGTAVFTAHLKSRNKEIPKLMQDRKRARRARRTNGRRHRRQRRAKANGTISKKCVKQTTTQNGSVSKRAKEIGIIKRHLPGCEKDVLCIGIKNKEAKYTNRERPEGWLTPTANQLLQTHVNLVKKVQKLLPISDVVLEVNKFAFMRLDNPDIQKWQYQQGPLYKKESLESAVSEMQEHHCLFCKKPIDHYHHVVPKSENGSNTIANIVGLCAEHHNLVHKDVAWQEKLAEEKTGLNKKYGALSVLNQIIPALTNKLSVLFPKHFFVTAGKSTHDYRAAHGVSKDHWLDAYCIACSVLPSNVCDSNINNHVPYELKQFRRHDRRVLHKANMSRVYTLNGKAVATNRHKAIKQTTDSLEEFRQNYPDDVYKLKVKEHHPAYRNLNRNYPGSVFLVGKQAHVMQGIASSKDGKTTKYNDTNATTITAGKCKFVAKNSGILFVQCKFRKALSDGTTKKLQYPV

SEQ ID NO: 21422 - protein, 443 aa, unidentified
VVKANGTAVFTAHLETRNKEVPKLMQDRKKARRARRTNGRRCRRQRRAKANGTISKKCVKQDTAQSKNPSKRAKEIGIIKRRLPGYKKDVLCIGIKNKEAKYTNRTRPEGWLTPTANQLLQTHINLVRKIQKFLPISDVVLEVNKFAFMRLDNPDIQKWQYQQGPLYQKGSLENAVSEMQEHHCLFCDKPIDHYHHVVPQSENGSNTIANIVGLCAEHHNLVHKDAAWQKKLAEEKVGLNKKYGALSVLNQIIPALTNKLSVLFPKHFFVTAGKSTHDYRATHGVSKDHWLDAYCIACSVLPSDVCDSNINNHMPYVLKQFRRHDRRVLNNENMNRVYTLNNKAVAINRHKAKDQKTVSLEEFRKEHPDDVCKLKVKEHHPTYRNMNRNFPGSVFLVGKQIHVMQGIASSKDGKATKYNDTSATAIAARKCKFVAKNTGILFV

SEQ ID NO: 21423 - protein, 465 aa, unidentified
MSTCVCVLSNSGERLMPTFRLGKVRRLLKDGKAKIIKHHPFTIQLLYDSKTNTQPIEICEDVGYNYIGISVKSESHEYVSAQYDTLQDEKKHHDDCRKYRRTRRNRLRYRKPRFDNRKRSEGWLAPSLEHKKQLNIRLIERYVSVIPITRATVEVGSFDTMLLQAIQKGESKPEGTDYQKGPRYNLATLREAVFYRDNYTCQVCGRKIADGAILHMHHMFYWKGRHGYQLDELVTACEKCHTPANHQKGGKLFGFGEDKEFANLSGAAFMNTVRWQIVNALYATYGKEFVTITYGAMTKEKRIALQLEKTHNNDAYAMGDYHPACRCKFRHYQKRRRNNRVLEKFYDATYIDARTGNKAKGKELFNGRISRNHKKDSENLHKYRGKRICKGHRALRRKKLALNPGDLVSLNGEILVVHGTHTKKNGSVNVEFKTPSRGGKKSASLKKLKIVKTSNLMHSAWTKVS

SEQ ID NO: 21424 - protein, 438 aa, Streptomyces sp.; identical to SEQ ID NO: 15096

SEQ ID NO: 21425 - protein, 415 aa, unidentified; identical to SEQ ID NO: 17971

SEQ ID NO: 21426 - protein, 464 aa, unidentified; identical to SEQ ID NO: 5436

SEQ ID NO: 21427 - protein, 427 aa, Anabaena sp.; identical to SEQ ID NO: 11988

SEQ ID NO: 21428 - protein, 502 aa, unidentified; identical to SEQ ID NO: 16429

SEQ ID NO: 21429 - protein, 408 aa, unidentified; identical to SEQ ID NO: 17248

SEQ ID NO: 21430 - protein, 442 aa, unidentified
MSTSVFVLDKKHRPLMPCRPARARRLLRAGRARVVKRFPFVIRLVDRTVEQSEVQPVLIKLDPGSRETGAAVVRDDGKKRHHALAFFVIEHRGGAIRDALKARSAFRRRRRSQNFRCRSPRFLNRVKPKGWLPPSLRHRVETTLSFVRRMCRYLPVSGIATELVKFDSQKLQTPEVSGIEYQQGTLFEYEVREYLLEKFGRKCVYCGAEGVPLNIDHVVPRAKGGSNRVSNLVLACVSCNQKKGARSLEDFLKGKPEVLARVRRELKTPLRDAAAVNATRWVLFNELKATGLPVETGSGALTKLNRHAFGVEKEHWLDALCVGRLNGVVTRKGLNVLEIRCMGRGSRQRTRLTKYGFPRGYLMRQKCVHGFATGDMVEANVPKGKKAGLWRGRVAVRVSGSFNIQTPKGVIQGVGWKHCRLISHNDGYGYAWLGHAPHSSPA

SEQ ID NO: 21431 - protein, 465 aa, unidentified
MSTCVCVLSNSGERLMPTFRLGKVRRLLKDGKAKIVKHHPFTIQLLYDSKTNTQPIEICEDVGYNYIGISVKSQSHEYVSAQYDTLQDEKACHDSCRKLRRTRRNRLRYRKPRFDNRKRDDGWLAPSLRHKKELNVNVVKMYCAVMPITHATIEVGSFDTMLVKAIQEGKAIPEGADYQKGPRYNLATLREAVFYRDNYVCKVCGRKATEGAILHVHHMFYWKGRHGNSLSELITVCEKCHTPANHQKGGKLYGFGEDIKFANLSGAAFMNTVRWQIVNVLNAAFGKPFVTFTYGAMTKEKRIALHLEKSHNNDAYAMGSFHPVNRCAFEHYEKVKRNNRILEKFYDSQYIDTRTGELTNGKSLFNGRISRSHKKDSENLHKYRGKRICKGHYALRRKKLALNPGDLVSLNGEILVVHGTHTKKNGSVNVEFKTPSRGGKKSASLKKLKIVKTSNLMHSAWTKVA

SEQ ID NO: 21432 - protein, 582 aa, unidentified; identical to SEQ ID NO: 8788

SEQ ID NO: 21433 - protein, 448 aa, unidentified
LGKDFYPLRRREQFLFSCQFIERSMASMQYVYVLNKHGEPLMPCSPGKARLLLKQQKACVVKRTPFTIKLLYGSAGYKQPVALGIDAGSKHVGLSASTEKRELYREEFTPRNDVVELLSTRRQNRRSRRNRKTRYRAPRFDNRVHSKHKGWLAPSVEVKIQEHITVIKRICRILPITLVRVETAEFDTQRLKAMLKGKPLPVGTDYQLGEMYDEYNVRQYVLKRDNYTCQCCGAHPTEKKPIRLHVHHIESRHVGGNAPNNLITLCVACHKALHEGKITLDKGKKRGKPLRDAAFMGIMRNTLLARLKDELNIPVKQTYGYITKLLREKNKIPKSHVNDARCIAKAPNAKPCDTMLYTRALRHHNRQIHKAKILKGGIRKKNQAPYLVKGFRLWDKVRYNGEECFITGRRSSGYFALKKYDGTVISNSASYKKLMLLEAATNYITERS

SEQ ID NO: 21434 - protein, 451 aa, unidentified; identical to SEQ ID NO: 18460

SEQ ID NO: 21435 - protein, 413 aa, unidentified
MTDYAFVLDANGKQLAPTKEQKAWFLIRRKRATLVSKYPLVIQLKKKIPDKKICKDEVRCGIDDGGLHVGVALVQKCQTRNKVVFKGVIEQRNDVKHLMDVRRGYRSYHRYHKRYRPARFNNRSSSKREERIAPSILQKRQATIRVINQLNRWINITNYWLEDVAIDIRALTDGYKPYRWQYQKSNRLDENIRKAVILRDGCRCMECGKSNCRLEVHHIKPRRLKGSSTLGNLITLCTKCHQKTEGVEELYMDRYFALLNSSDNRNLNYAQHVMIGKQWLREQLSNLGMLYLTNGGDTANKRIDWDITKSHSNDAICITDLRPDTCEIKEWVIKPMRRQSKAKTDNVLGIKHRDLVEYTFRNGETHRGYVTALYPEQNAINFQSPAKHCKKVNAGKCKVLWKYSKIYWLDNVS

SEQ ID NO: 21436 - protein, 442 aa, unidentified; identical to SEQ ID NO: 2834

SEQ ID NO: 21437 - protein, 424 aa, unidentified; identical to SEQ ID NO: 3434

SEQ ID NO: 21438 - protein, 436 aa, unidentified
MSTVLKSRTYHQRKERSVMLVYVLKQNGQPFMPTERFGKVRRLLKEGKAKVVRREPFTIRLLYESETDVVQECYCGVDTGSKHIGVAVVSDDKVLYQSQTELRDDIKQKMDNRRMYRHNRRSRKTRYRKQRFLNRRNSIREDRLPPSVRHKVQAHIDEIEFCKKIPPVSDLILEVSQFDTALMKNPSLMNEKIRHWGYQQGFNYGYSSRREAVLHRDNYTCQCCGKKNCRLEVHHIKFKSNGGTDDEENLITLCKECHDRVHAGTVVLDKKPKKMRLKHATHMSIIRSWLLKIYPDAIETFGFVTSENRNHLNLSKDHYIDACVIASGGLEFKPLDVVFYKRRMSKGNYRLTRKSFGKEIICKGKILGFKSFDKVEYFGVECFIGSRRNSGIATLVDIFRNTLDFSHLQKGFKLPKMRLLKRISSRKTTAISIINV

SEQ ID NO: 21439 - protein, 428 aa, unidentified
MLVYVLKENGQPFMPTTRFGKIRRLLKTKKAKVVRREPFTIKLLYEPETDVVQECYCGVDTGSRHIGVAVVSNDKVLYQSQTELRSDIKRKIDARRAYRRNRRQRKTRYRKPRFLNRSNSTKSDRLPPSVKHKVQAHIDEIEFCKKILPVSDLIVEVSQFDTALMKDPSLISEKIKHWGYQQGFNYGYSSRREAILHRDNYTCQCCGKKNCRLEVHHVKFKSNGGTDDEENLLTLCEDCHKGVHAGTVTLDKKPKKNKNLKYATHMSIIRSYLLKKYPDAIETFGFVTSENRNHLKLKKDHHIDACIIASGGLGFKELDVICYKRRVSKGDYKLARGIRGEQKLPTGKICGFKKFDKVKYLGNEYFIKGRISSGLTILMDIFGNKIDFSDMPRGTKTPKLSKCKRISARSSCLCISQIRKERAIHVLS

SEQ ID NO: 21440 - protein, 393 aa, unidentified
NKAKVKRRTPFTIQLSIATGETKQDVILGVDSGSKHIGLSATTDKVEVFASEVELRQDISGLLADRLAFRRGRRHRKTRYRAPRFNNRVHSKHKGWLAPSIENRIQAHISRIDAVCKLLPVTKIVIETASFDIQKIKNPDVEGEGYQQGDQLGFWNVREYVLWRDGHVCQHCRGRSKDKILNVHHLESRKTGGDAPNNLITLCETCHKAFHAGKIKLKVKRGKSFKAETFMGIMRWTLLERVRLTHPHLPVENTFGYLTKHKRIALGLPKTHCADAFCIAGNLKAQRSGVYLYQKQTRKHNRQIHKCSILKGGVRKLNQSPYLVEGFRLFDKVKCLGQVGFIFGKRSSGYFDVRTLGGKKLSPAIHAKKLTLLEKRKTFLTELRKENGASSPV

SEQ ID NO: 21441 - protein, 466 aa, unidentified; identical to SEQ ID NO: 8215

SEQ ID NO: 21442 - protein, 536 aa, unidentified; identical to SEQ ID NO: 2718

SEQ ID NO: 21443 - protein, 423 aa, unidentified; identical to SEQ ID NO: 3951

SEQ ID NO: 21444 - protein, 414 aa, unidentified
MVYVLNMDGQPLMPTNRHGKVRHLLKDGMAEVVKRCPFTIKLLYRSTNHTQPVALGVDAGSKHIGLSATTENKELFASDVELRNDIVDLISTRRQNRRGRRSRKTRYRKPRFLNRTGNRKAGWVAPSIQNKIQTHLTVVDKVCRMLPVSKIVVETASFDIQKIKNPDICGTEYQQGEQLNFWNVREYVLFRDGHKCQCCKGKSKDKILNVHHIESRKTGGDAPNNLITLCETCHTGYHKGTVKLPKTIHRGMVFRDAAFMGIMRWAFYNELKRRYPNVSHTYGYITKNIRIENNLPKYHYIDARCISGHPLAVPSGEVFYQKKVRCHNRQIHKNTIGKGGYRKRNQAEYIVKGFRLFDKVSYKGQECFIFGRRSSGSFDIRLLDGTKISAGVTYKKLRLLETRGSFLIERRLVG

SEQ ID NO: 21445 - protein, 406 aa, unidentified; identical to SEQ ID NO: 13750

SEQ ID NO: 21446 - protein, 270 aa, unidentified
LQLLKAIADGKPVPQGEDYQKGEMYGHYNVRQYVLWRDNYTCQCCGTHPSKKKEVRLHVHHLESRKVGGDAPDNQVTLCESCHEKLHKGLIAEKDFKKRKRRSTRDATFMGIMRKTLMQRLCSELPIPVVKTRGYITKATREKLLVLPKSHTNDALAIAQGKQGFNVGYLPGIVQINKIYTIRPVRHHNRQLHKAAILTGGIRKSNQAGKYVFGYCLFDKVQFNGQDCFIWGRRTTGIFTIKTINGKMIKDGISFKKLKLVEKSTSYLIA

SEQ ID NO: 21447 - protein, 437 aa, unidentified; identical to SEQ ID NO: 16004

SEQ ID NO: 21448 - protein, 419 aa, unidentified
MVYVLDINGQPLMPTARHGKVRRLLNSHLAKVIKRCPFTIQLLYQSTKETQSVSLGIDAGSKHIGLAATTEQKVVYQEELIPRNDVVKLLSARRLLRRSRRNRKTRYRKLRFNNRVRSKHKGWLAPSVEVKIQEHITAIKRICQILPISEIHVETAEFDLQRLKAMEEGSPLPVGTDYQLGEQYDFYNTRQYVLHRDRYTCQCCGAHGNNVKLHVHHIESRQTGGNAPNNLITLCEHCHKALHEGKLELSKGKKRGKSYRDAAFMGVMRKTLLERLKKEVDVPVTETYGYITKYWREKAGLEKSHINDAICISKHPYAKPLNTYYLAKAVRHHNRQIHKAKISKGGIRKRNQAPYLVKRFRLFDKVLYQGKECFIFGRRVSGRMDVRLLDGTRINASVGYKNLKLLELRKAYLTERRTC

SEQ ID NO: 21449 - protein, 439 aa, Ktedonobacter sp.; identical to SEQ ID NO: 9125

SEQ ID NO: 21450 - protein, 429 aa, unidentified
MVVYVVDKNGQPLMPTYNGAKVRVLLKQKRAKVVSKCPFTIKLLYESTTFKQPLTLGVDTGSKYVGSAVINDITSDVVYESQIELRDDIKSKMDRRRAFRRSRRNRLRYRPSRFNNRKSSKHKDNYNPTLTSKLQGHMREIEFIKSILPIKDVILEVGEFDTQLLQDYTLAYHKWDYAKGELYQQENFKQAAKARDGYKCQCCGKKNCRLEVHHLLPRSRGGSDKLANLITLCSDCHYLAHSSEEQLLAFQKKFGKKAKGTLRYATQMNVLRSMLQKEYPDAELTYGFITKEMRRVFGLEKSHTIDACCIASRGSEFYNENSNKYKKKYVAKGDYVRTSTSYRKFVVLPKGKIAGFNRYDKVLYNNKEYFVVGRISTGLVYLIDIDNNRVQTERTKRGTGEKYLSKAQIKVSCVKKVASTKGCVCVRML

SEQ ID NO: 21451 - protein, 346 aa, unidentified
MVYVQDINGKPLMPTTRHGKVRRLLKDKKAVVVNLCPFTIKLMYVTSDYKQEIVLGVDAGTKHVGLSATTKSKELYSSEVILRNDIVDLLSTRRELRKARRNRLRYRKPRFDNRVKSKRPGWIAPSVKYKVDAHIRVVENVCSILPISRIVIEVAQFDTQKIKNPEILGKEYQEGDQLEFWNTREYVLARDGHKCQYCKGKSKDSILNVHHIESRKTGGDSPSNLITLCETCHKEYHKGNIDLKIRRGKSLRDAAVMGIMKWRLYEELKSRYDRVFMTFGYITKHNRIKYGIEKSHTSDAFVISKNINAKRIERQYLKRLIRRHNRQIHKMKILRGGEEEKQSSSF

SEQ ID NO: 21452 - protein, 416 aa, unidentified
MVYVLSQHGQPLMPTENHAKVRALLKHGKAKVIQRCPFTIQLLYESTTHTQKINLGIDAGSKTIGVSATTDSKVLYESEVVLRNDIVELLSGRRALRNSRRSRKTRYRKPRFDNRKKPDGWLAPSIRQKIETHVTVVGNVMKILPVTKIIVETASFDIQKIKNPEIEGEGYQHGEQLDFWNVREYVLFRDGHTGQCCKGKSKDNILNVHHIESRKTGGNAPNNLITLCETCHKAYHKGIITLPKEIHRGMRFRDAAFMGIMRWAFYDRLKELYNPLGAEVINTYGYITKNTRIEHGLPKEHYVDARCISDNPAAKPLDHYYFQKKVRCHNRQIHKNTILKGGIRKRNQASYEVKGFRLYDQVLWKGQKCFIFGRRSTGRMDLRLLDGTHINASVGHKNLKLLSMRKNYLIEQRKAG

SEQ ID NO: 21453 - protein, 470 aa, unidentified; identical to SEQ ID NO: 4092

SEQ ID NO: 21454 - protein, 475 aa, unidentified; identical to SEQ ID NO: 4985

SEQ ID NO: 21455 - protein, 353 aa, Arthrospira sp.; identical to SEQ ID NO: 3451

SEQ ID NO: 21456 - protein, 460 aa, unidentified
MVAVVDLFGKPLMPTNEYRARKLLKRKKAKIFCYRPFTIQLTERKDTEIQPIELCMDTGYIHIGISAKSERHEYLGMQIDTLTDEKLKHDDKRQYRRQRRNRKRYRAPRFDNRRRKEGWIAPSLEHKKEIHIDAIQRICKVMPITDITLEMGNFDTQVLKAVEEGKPLPQGSDYQYGERYGIATLREAVFLRDGYKCQCCEKSVKDGAILHVHHIKYRSQGGTNRMSNLITVCDKCHTPQNHKPGGKLWNWKPKLAEFKGASYMTSIRWMLYNEVTALLPNSSVHITYGAKTKESRRKLDIKKSHVNDAYVMGLFCPKHRTKPVYFKKKRRNNRVLEKFYDAKYIDSRDGKKQSGQELFNGRINRNHRKDSENLHLYRKQKVTKGKRSIRNKHYPIQPHDILLYQKKKYETAGCHNNGSRAILLPEKKSVALKQLTIYQYAGGYYRVPYESNKKEERTGS

SEQ ID NO: 21457 - protein, 451 aa, unidentified; identical to SEQ ID NO: 3061

SEQ ID NO: 21458 - protein, 431 aa, unidentified
MPNKVYVINKHGRPLMPCSPAKARHLLDAGKAKVKKRTPFTIQLVYGSSGYTQEVILGVDDGSKTIGISASTKKEEVFAADVTPRNDVVNLLSARREFRRARRNRKTRYRKSRFDNRVRSKRKGWLAPSVEVKIQEHITSIKRVCRILPVSKVVIETAEFDLQLLKAIADGKPVPQGEDYQKGEMYGHYNVRQYVLWRDDYTCQCCGAHATKKKEVWLHVHHLESRKVGGDAPDNQVTLCESCHEKLHKGLITEGDFKKRKRRSTRDATFMGIMRKTLMQRLCSELPIPVVETRGYITKATREKLLVLPKSHTNDALAIAQGKRGFNVGYLPGIIQTDKIYTIRPVRHHNRQLHKAAILKGGIRKSNQAGKYVFGYRLFDKVQFNGQDCFIWGRRTTGIFTIKTINGKMIKDGISFKKLKLVEKSTSYLIA

SEQ ID NO: 21459 - protein, 493 aa, unidentified
MAAVYVISASGKPLMPTTRCGHIRGLLNAGKARVVEREPFTIQLKYETPDVTQPLYLGIDPGRTNVGSAVVREDGECVFTAQLTTRNKDVPKLMKARKQFRMAHRRLKRRCKRQRRAKAAETFSQKGEVQRLLPGYEEPILCKGIRNKEARFNNRQRPAGWLTPTANHLLLTHLNMVKKLQKLLPITDVVLEVNRFAFMAMENPSIRRWQYQQGPLYGKGSVEDAVYAQQDGHCLFCGKPIAHYNHVVPQHKNGSETLENRVGLCNEHHDLVHKDRAWDAKMKETKAGLNKKYHALSVLNQIIPALTEQLTAMFPQHAFVTTGKDTADFREDYGIAKEHHLDAYCIACSVLAEPTKVAAPTGKPHRLMQFRRHDRQVCHKENIKRVYLSEGKAVATNRHKAIEQKDDSLEEFRKTHTQQEVSALTVKDHQPVYKDMRRFMPGGVFLFNGKVHTLQRSHGRYKGMPFYYIDTDGSKNHAKGCIFLQQNCGLRWV

SEQ ID NO: 21460 - protein, 512 aa, unidentified
MSTVYVLNKDGKPLMPTTRCGHVRHLLKEQKARVVTSKPFTIQLLYETNDVVQPLYLGIDPGRTNIGVAAVKTDGTAVFTAHLETRNKEIPKLMQGRKKARRARRTNGRRCRRQRRAKANGTISKKCVKQTTAQNGSVSKRAKEIGVIKRHLPGCEKELLCIGIKNKEAKFSNRTRPEGWLTPTANQLLQTHINLVKKIQKFLPISDVVLEINKFAFMQLDNPNIQKWQYQQGPLYQKASLEEAVSEMQEHHCLFCKQSIVHYHHVVPQSENGSDTIGNIVGLCTKHHDLVHKDTAWQKKLAKKKTGLNKKYGALSILNQIIPALTKELSSLFPKHFFATNGKSTHDYRAAHDVSKDHWLDAYCIACSILPNDTCDKNINGRVPYKLKQFRRHDRRALHKENMSRVYTLDGKKVATNRHKAIKQTTDSLEEFRQRQPNDVCKLKVKEHHPEYRNPERNFPGCVFLVGKHTHVMQGTSGSHNGKADGYYDTNGNSYPSGKCKFVAKNKGIVFA

SEQ ID NO: 21461 - protein, 416 aa, unidentified
LRVFVLNKRGKPLMPCSPAKARLLLKEKKAIVVRRTPFTIQLTIATGESKQPVSLGVDAGYKHVGLSASTEKAELYASEVELRKDITDLLSARRALRQSRRNRKTRYRAPRFDNRIRTKRKGWLAPSVENRINAHLSRIEAVLRLLPITKITVETASFDMQRLKNPDISGKEYQEGEQLGFWNVREYVLFRDGHVCRHCHGRSKDPVLNVHHLESRRPGSDSPDNLITLCVTCHKALHRGEITLKAKRGQSFRAQAFMGIMRREVLNRLKASYPELKVHETYGYLTKHARIANGIVKSHGADAFCIAGNLGAKRLGEFFFQKQTRRNNRQIHKLSILKGGIRKRNQAPFEAKGFRLFDKVACQGEEGFIFGRRSSGFFDVRKLDGTRISAGISCKKLHLLEKRRTYLTEIRKEEAL

SEQ ID NO: 21462 - protein, 424 aa, Microcoleus sp.; identical to SEQ ID NO: 7309

SEQ ID NO: 21463 - protein, 396 aa, unidentified
MKVFVINMHGEPLMPCSPRKARILLKEKRAKVVQREPFTIQLLYGSSGYKQDITIGIDTGHDEVGVSVTTETKELFSSVFKMRNDISKKMTTRRMYRRNKRSRLRYRKPRFDNRAASTRKGRLAPSVEWKVETHKRIISFYQNRLPKCKVILETGIFDMQKMQNPEIKNEMYQKGIQYGYANTKAYVLTRDRHTCQAGKSGCTKRLEVHHIKFKSQGGSDNPKNLITLCSKHHKELHEGKLILNIKKHKSLRSATTMNIIRKRLLGYYPNAIETFGYVTKQNRQNLGLEKSHSNDAFVIAGGNNQQRAETMDYKFKQANNRAIGIHRKGYAPTARKVRYLIQSGDIIKYEGRTYTSKGNKNKGKSILLEIEGKKKTVNSKKVELIYNRKNIQCIYA

SEQ ID NO: 21464 - protein, 426 aa, unidentified
  source 1..426: note = Cyanobacteria bacterium UBA11371
MSNFVLVLDTNRKPLNPCTPGVARSLLKSGKAKVFRRFPFTIVLNKAVDDNPQPMELKLDPGAKTTGIALLQGEKVVFGAELIHRGQQIKDALESRRALRRGRRNRKTRYRKPRFLNRTRQSGWLAPSLGHRVETILTWVNRLRRSAPIAGISQELVRFDLQQMDNPEISGIEYQKGTLFGYEVREYLLNNKKWERKCAYCGTENVPIQIDHIHPKSQGGTNRVSNLCLACEPCNIKKGTQSIEVFLKKKPVVLKQILAQVKRPLKDAAAVNITRWTLFKRLKQTGLSVETGSGGQTKYNRCRLELPKQHYIDAACVGKVEQLTILTQQPLLIKATGHGTRQMCGTNKYGFPFRHRSRTQIHKEFQTGDIVKAIVTSGKKVGTYIGRILCRATGSFDIVTKSVRVAGISYKYCKSIHRKDGYSYAF

SEQ ID NO: 21465 - protein, 431 aa, unidentified
MPNKVYVINKHGRPLMPCSPAKARHLLDEGKAKVKKRTPFTIQLIYGSSGYTQEVILGVDAGSKTIGMSVSTTKEELLSAEVKPRNDVVDLLSTRREFRRARRNRKTRYRKPRFDNRVRSKHRGWLAPSVEVKIQEHITSIKRVCRILPVSKVVVETAEFDLQLLKAIADGKPVPQGEDYQKGEMYGHYNVRQYVLWRDGYTCKCCGAHTTKKKEVRLHVHHLESRKVGGDAPDNQVTLCESCHEKLHKGLIAEKDFKKRKRRSTRDATFMGIMRKTLMQRLCSELPIPVIETRGYITKATREKLLVLPKSHTNDALAIAQGKRGFNVGYLPEIAQIDKIYTIRPVRHHNRQLHKATILKGGIRKSNQTEKYVFGYRLFDKVQFNGQDCFIWGRRTTGIFTIKTINGKMIKDGISFKKLKLVEKSTSYLIA

SEQ ID NO: 21466 - protein, 459 aa, Moorella mulderi
VVFVLDQHKRPIMPCSERQARKLLKEGRAVVHRLVPFVIRLKDRIVEQSVLQPLKLKIDPGYEATGISVVRVAEGKEAAVFFAEVHHRTDIPEKLLSRRQARWSRRSRRTRYRKPRFDNRRRPEGWLPPSAEARINWALSTVKKLLRWLPIREIIVESAKFDTQKLQNPEIFGVEYQRDELTGCEVREYLLEKWGRKCAYCGKENVPLEVDHVVPKSRGGTDRVSNLTFTCREGNQTKGNKLLQEWLEELKRSERAVDRKRADNVPKVLSQLGEPLKGAAFMNAARHALVERLGSLGLPVFTATTARTKYDRTRLSLPKTHYFDARCVGEVPDKLEVAAEYVQVFRAVGRGRRQMANFDRHGFPRAHRLRKNVHFGFATGDLVVAEVPAGKYAGRHVGFVAVRASGYFDLKNFLGDRVCQGVSWKRFRLLQRFDGWRYEKFKSAALSSPGLKARASSAA

SEQ ID NO: 21467 - protein, 422 aa, unidentified
LNKRGKPLMPCSPAKARLLLKEKKAIVVRRTPFTIQLTIATGESKQPVSLGVDAGYKHVGLSASTEKAELYASEVELRKDITDLLSARRALRQSRRNRKTRYRAPRFDNRIRTKRKGWLAPSVENRINAHLSRIEAVLRLLPITKITVETASFDMQRLKNPDISGKEYQEGEQLGFWNVREYVLFRDGHVCRHCHGRSKDPVLNVHHLESRRTGSDSPDNLITLCETCHKALHRGEITLKAKRGQSFRAQAFMGIMRREVLNRLKASYPELKVHETYGYLTKHARIANGIVKSHGADAFCIAGNLGAERLGEFFFQKQTRRNNRQIRKLSILKGGIRKRNQAPFEAKGFRLFDKVACQGEEGFIFGRRSSGSFDVRKLDGTRISAGISCKKLRLLERRRTYLTEIRKEEALPPLPEGGGLRA

SEQ ID NO: 21468 - protein, 428 aa, unidentified
MLVYVLDKNEQPLMPTHNGAKVRVLLKQKRAKVVSKCPFTIKLLYESTNFTQPLTLGVDTGSKYVGSAVINDATSEVVYESQTELRDDIKSKMDRRRQFRRARRNKLRYRPVRFNNRKSSKRKDRYNPTLTSKFQGHTREIEFVKSILPISDIVLEVGEFDPQLLQAPTLAYRKWGYQKGELYQQENFKQATKARDDYKCQCCGKQNCGLEVHHLIPRSSGSDKLANLITLCTDCHHLAHSSEEQLLAFQKKFGKKTKGTLRYATQMNVLRHMLQREYPNAEVTYGFITKEMRRVFGLEKSHMIDACCIASRGSEFHNENSNRYKKKCVAKGDYTRTGVSGGKFGILPKGKIVGFRRYDKVFYNSKEYFIAGRMSIGKVYLIDIDNNRLQVERTRRGTGEKYTSKAMIKVSLVRKVTSAKTCLCTINK

SEQ ID NO: 21469 - protein, 513 aa, unidentified
LKKEAAGHQQGKDCRPVRYGPPYRAGMPDGRRKPERKHMVAVVTSTGKPLMPTSAYRARKLLKKGRAVIFKYRPYFTIQLVDRADGEVQEVEYKSDTGSVHVGISVCTEKKELLSEQRDLLENEPEHHNDRKKNRRTRRNRKRYRKPRFDNRKKKPQVGHEKWLPPTLLHKMEVQVRLYREFCRVVPVTSACFEMGKFDTQALKAVLKGDPVPEGEGYQKGERYGTDTLRAAVFLRDGHTCRFCGRSVKDGAVLHVHHVGYWKGDRTNRPANLASACEQCHTPANHGKNGLLYGKEPEFKTLKDASYMTSVRWIMLDEIKKAAPGVRVSVTYGVTTKKKRQELRLPKSHVNDAFSMASFHPKKRADTEYWKKIPRHDRVLQKFYDAVYLDTRDGSKKKGSEMSNGRISRNHKKDNENLHQYRGLKVLKGHDSIRRGASSLKPGSIVMYKGEKMTVHGTHTRYVTDKEGKTVKKVNVQFTCPASDGRKSASMNKCTPVSRVYNTGWKRYWPDKK

SEQ ID NO: 21470 - protein, 470 aa, unidentified; identical to SEQ ID NO: 2825

SEQ ID NO: 21471 - protein, 340 aa, unidentified
MILRLGQVDQSSQRYATRRQLRRSRRSRKTRYRPARFDNRKRKEGWLAPSIRQKIGSHLTVVANVCKILPINQIIVETASFDIQKIKNPDIQGTEYQQGEQMDFWNVREYVFFRDGHTCQCCKGRSKDKILNVHHIESRKIGGNAPNNLITLCETCHKGYHNGTVILPKNIKRGMQFKDAAFMGIMRWAFYNALKEQYEPAIPVSMTYGYLTKNTRIEHGLLKEHYIDARCISGNPDAVSDGTYYYQKKVRCHNRQIHKQTILKGGIRKSNQAEYLVKGYRLFDKVRYHGREYFIFGRRKTGFFDIRTLSGEKVNKGSISVKKLTFADTRKNYLTERRTA

SEQ ID NO: 21472 - protein, 518 aa, unidentified; identical to SEQ ID NO: 7468

SEQ ID NO: 21473 - protein, 512 aa, unidentified
LLKISEGRRRANIIPKGKTVQQHWRCGPRGASPDLSIHYYLTKGVPCMSTCVCVLSNNGERLMPTIRLGKVRHLLKDGKAKIIKHHPFTIQLLYDSKTNTQPIEICEDVGYNYIGISVKSESHEYVSAQYDTLQDEKEHHDDCRKYRRTRRNRLRYRKPRFDNRKRDDGWLAPSLEHKKELNVNVIKMYCEVMPITHAIVEVGSFDTMLVKAIEEGKATPESADYQKGPRYKLATLREAVFYRDNYTCQVCGRKANEGAILHVHHMFYWKGRHGNSLSELITVCEKCHTPANHQKGGKLYGFGEDIKFANLSGAAFMNTVRWQIVNVLNAAFGKPFVTFTYGAMTKEKRIALHLEKSHNNDAYAMGSFHPVNRCAFEHYEKVKRNNRILEKFYDSQYIDIRTGEIATGKELFNGRISRSHKKDSENLHKYRGKRICKGHRALRRKKVALNPGDLVSLNGEILVVHGTHTKKNGSVNVEFKTPSRGGKKSASLKKLKIVKTSNLMHSAWTKVA

SEQ ID NO: 21474 - protein, 418 aa, Anoxybacillus sp.
KRPLAPCHEAVARKLLKQGKAAIYRRFPFTIILKKSVDESEIKATYRLKIDYGSRHTGLAILRGQEVVWLGQLDHRTDIKERIDKRRAFRRARRNRKTRYRKPRFLNRKRKEGWLPSSLESRVQNIQTWVNRLKKLCPIGYISYENAKFDTQLMRNPEINGVEYQQGTLQGYEVREYLLEKFGRKCCYCGKENVPLEVEHIIPKSRGGTDRVDNLCLACHDCNQRKGSKTAEEFGYPHIQKQVKESLKDASAINSTRWKAYEVLKQTGLDVECGTGARTKMNRIRLDLPKTHYFDACCVGESTTNHLYFKTKEVLFIKAKGRGSHSRTNLDRYGFPRGYLARQKFFFGFQTGDMVKAVVPRGKYQGVWFGEVACRKTGSFDIKGKDGKRIAQGINYRYVQVIQRFDGYAYGKGVAELA

SEQ ID NO: 21475 - protein, 465 aa, unidentified
MSTCACVLSKNGERLMPTIRLGKVRHLLKDGKAKIVKLHQFTIQLLYDSKTNTQPIEICEDVGYNYIGISVKSESHEYVSAQYDTLQDEKDCHDSCRRMRRARRNRLRYRKPRFDNRKRDKGWLAPSLEHKKELNVNVIKMYCEVMPITHATVEVGSFDTMLVKAIQEGKAAPEGADYQKGPRYNLATLREAVFYRDKYTCQVCGRKANEGAILHVHHMFYWKGRHGNSLSELLTVCEKCHTPANHQKGGKLYGFGENIKFANLSGAAFMNTVRWQIVNELYAAFGKPFVTFTYGAMTKEKRIALHLEKSHNNDAYAMGNFHPTDRCAFEHYEKEKRNNRILERFYDSRYIDIRTGEVANGKELFNGRISRSYKKDSENLHKYRGRRICKGHRALRRKNVALNPGDLVSLNGEILIVYGTHTKKNGSVNVEFKTPSKSGKKSADLKKLKIINATNLVCSAWKKVS

SEQ ID NO: 21476 - protein, 446 aa, unidentified
MEILRIDWKDICPTGRSGLPQKELFMRPVYVLDMNGKPLMPTCRFGKVRRMLKSGEAKVVDTLPFTIQLDRPTKTHVVQSVTLGCDPGRTNIGLAAVRSDGTDLYRSHCETRNKEIVDLMDTRRAARRASRRGERLARKRLAAKHETATTFPGGRKLPGYEKPIMLKDIINTEARFNNRVCPAGWLTPTATQLLRTHLNLIKRISRILPVSDIALEINKFAFMQLDEPDKNKWNIDFQHGPLYGTGGLKAAVRQLQNNTCLLCQENVIEHFHHLIPRSKRGDNTINNIAGLCQRCHEAVHKSADTAEKLSTLKKGQTKRYGGTSVLNQIISKLVEELGKTYHEHLHLTYGWQTKEFRTKHKLEKTHDTDAYCIAAGTMQTVKPNIRTDVYEIKQFRRHNRANIHHQTERTYKLNGQTVARNRRKRTDQKTDSLAEWFENTVKQYGQ

SEQ ID NO: 21477 - protein, 440 aa, unidentified
LILGIDPGRTNIGVAVVKEDGQCVFSAHLETRNKDVPLLMKKRAGFRKQHRTLDRRRKRQRRAKATGNTVKNETIERLLPCYQRPIVCHYIRNKEARFNNRSRPAGWLTPTANHLLQTHINLIAKVAKFLPITKVVVELNRFAFMAMDNPNIRRWEYQQGPLYGLGSVEDAVYAQQDGHCLFCDKPIDHYHHVVPRHKGGSETLANRCGLCAEHHDLVHKDKAWAEKLVTRKDGMNKKYHALSVLNQIISFLMEYLGRETPYDVYATDGKSTKGFRIAKNVPKEHYTDAYCIACSILDANTKVSTPAEPFELKQFRRHDRQSCIRQMVDRKYILDSKVVATNRHKAIEQKSDSLQEFREVYGDAAVSQLTVRPHSPQYKDMTRIMPGAVMDFNGTIGVMQCSGGRNNGKVEFFKSTKGNKTPPKKCVLLAQNTGMVFIPA

SEQ ID NO: 21478 - protein, 423 aa, unidentified
MVYVLNIDGQPLMPTDRHGKVRHLLKDGRAEVVKCCPFTIRLLYDSTHYTQDIVLGVDAGSKHIGLSATTETKELYASDVELRNDIVDLISTRRQNRRFRRNRKTRYRKARFLNRLSDKKDWLAPSIRQKVDTHMTVVSRVCKILPVTKIIVETASFDIQKIKDPDISGTGYQHGEQLDFWNVREYVLFRDGHTCQCCKGKSKDPVLNVHHIESRKTGGDAPNNLITLCETCHKGYHSGAVQLPKAIHRGMRFKDAAFMDIMRWAFYNKLKEVYEPQDIEIRMTFGYLTKNTRIRHHLPKEHYIDARCISGHPEAIPNNEVFYQKKVRCHNRQIHKNTILKGGIRKRNQTGYLVKGFRLFDKVAYKGREYFIFGRRQSGFFDLRNLSGCKVNKGSLSYRKIGFLEPRQYYLCERRVMDTQGCA

SEQ ID NO: 21479 - protein, 431 aa, unidentified; identical to SEQ ID NO: 4463

SEQ ID NO: 21480 - protein, 424 aa, unidentified
MSNFVFVLDTQKRPLNPVQPGMARKLLTSGKAAVFRQYPFTIILKVEVTAIPDPITLKIDPGSKTTGIALVQGEKVVFGAELTHRGQAIKASLESRRSLRRSRRNRHTRYRQARFLNRTRHQGWLAPSLQHRVETTLTWVNKLIKFVPIKGIYQELVRFDLQQLENPEISGVEYQQGELAGYEVREYLLNKWERKCAYCGIENLPLQVEHIQPKAKRGSNRISNLCLACEKCNLKKGTQDIEKFLAKKPDVLKRILSQAKRQLQDATAVNSTRWTLFNRLKETGLPVSTSSGGLTKFNRTRLNLSKTHWLDAACVGQVNCLQVLTNQPLLIKAIGHGTRQMCRTDKFGFPSRYVPRLKFVKGFQTGDIVKAVVTSGKKIGTYIGRVAVRTTGSFNISAASGLIQGIGNKYCSLIHRKDGYLYAT

SEQ ID NO: 21481 - protein, 439 aa, unidentified; identical to SEQ ID NO: 3280

SEQ ID NO: 21482 - protein, 515 aa, unidentified
MTALEERLSKTEYIYVLGFDGKPQMPTRRKRHVLKLLKTGRARIAEDIPFTIRLTYRNAPVLQPVTLAEDPGRTNIGAAVLSPLGGLLFAAVIETRNKEIKKLMADRKKSRQASRRGERKARQRLAKRYGSMVKSGMVMRKLPMYAADKFVICKFIRNTQARFCNRKRCPDWITPTVQHLVQTHLNIIRKISRYLPVTDIAFEVNRFAFMHMENPKAMGVDFQNGPLKGYDDVKEAIRTQQHGKCLMCKKPISHFHHIVPRSRGGSDTIQNLAGLCPECHTKVHTDTTFRKDFDRKKSGQLKKYGALSALNQAVPFICKKLLEEYGEEHVHFCGGLDTSLIRTALGFEKTKKNQMHEVDAYCIGLAALEVNEVETPAFDHTFQIRQFRRQDRSIIHHQTGRSYYQGKEKVAQNRKPGFEQKTTALSQWYEEQVRIHGEKEAEKLRSQLRVEKSCRHYNDVDRFLPGAVFLYEGKRYVLSGRITNGKYLRACGQGMKNFPAAECTFIRHNAGLVFI

SEQ ID NO: 21483 - protein, 424 aa, Nodularia sp.; identical to SEQ ID NO: 20564

SEQ ID NO: 21484 - protein, 421 aa, unidentified; identical to SEQ ID NO: 5657

SEQ ID NO: 21485 - protein, 512 aa, unidentified; identical to SEQ ID NO: 5549

SEQ ID NO: 21486 - protein, 442 aa, unidentified
MGEGLQPIERSRRQNLRVFVLNKRGQPLMPCSPAKARLLLKEKKAVVRHRTPFTIQLTQATGETVQPVTLGVDAGSKFIGLSASTEKAEHYASEVELRKDVVDLLSSRRELRCARRNRKTRYRAPRFDNRGRSKNKGWSAPSVENKISAHLSRVAAVQKVLPVTKIAVETAAFDIQKIKNPDIEGTDYQQGDQLGFWNVREYVLCRDDHQCCHCHGKSKDPILNVHHLESRKTGGDAPNNLITLCETCHKAYHAGKITLKRKRGQTFRDAAFMGIMRWTFFNRLKSQYPELEVRNTYGYLTKNTRIRHGLEKTHHTDAFCIAGNLEAKRLGEYFFQKQTRKHNRQIHKMSILKGGVRKLQQAPYEVKGFRLFDKVRYDGREAFIFGRRSSGYFDIRLLTGEKVSAGVSYKKLVLLEKRKTFLIQLIKENAIPPATEVAGFLA

SEQ ID NO: 21487 - protein, 431 aa, Citrobacter sp.; identical to SEQ ID NO: 14739
  VARIANT 431: note = X can be any naturally occurring amino acid

SEQ ID NO: 21488 - protein, 420 aa, unidentified; identical to SEQ ID NO: 15421

SEQ ID NO: 21489 - protein, 420 aa, unidentified
MQYVYVLSKHGEPMMPCSPGKARLLLKQQKACVVRRTPFTIKLLYGSAGYKQPITLGVDAGSKHVGLSASTEKRELYREEFTPRNDVVELLSTRRQNRRSRRNRKTRYRAPRFDNRVHSKHKGWLAPSVEVKIQEHITIIKRICKILPISLVRVETAEFDTQRLKAMLAGKPLPVGTDYQLGEMYDEYNVRQYVLKRDNYTCQCCGAHTTAKKLVKLHVHHLESRKTGGNAPSNLVTLCTTCHKNLHKGKVTLDGKERGKPFRDAAFMGIMRKTLMARLKEELPIPAQGTYGYITKMRREQNDIEKSHTNDARCISKHPLAEPCSVCYRTKAIRHHNRQTHKANFSKKGIRKRSQMPYLVEGYRLWDKVLYKEQECFVSGRRSSGSFTLKKLDGTSVSKGVTFKKLRLLEPATNYLIERM

SEQ ID NO: 21490 - protein, 424 aa, unidentified; identical to SEQ ID NO: 4955

SEQ ID NO: 21491 - protein, 374 aa, unidentified
  source 1..374: note = Clostridiaceae bacterium UBA2240
LYDSPEYTQPITLGVDAGSKVVGLSATTEKKELFVSEITLRDDIPELLSTRRQNRRARRNHLRYRMARFLNRTASKKEGWLAPSVKHKVDSHLKVIGNVHRILPISKIVIETASFDIQKIRNPEISGREYQQGEQLGFWNTREYVLWRDNHECQHCHGKSKDRVLNVHHKESRKTGGDSPGNLVTLCETCHKSHHAGRIKLKLTPNKSYRHSSFMGIMRWYVYNSLQELYSEVSMTYGYITKNNRINNNIEKTHSADAYCISGNLNAKRIDEIYNQAFKRKHNRQIHKANFLKGGKKKLNQSAYEVKGFRLFDHVRYRDEECFIFGRRTSGYFDLRKLDGSVVHRSASFKEIKLLKRQNTILIERKGCNGVLLS

SEQ ID NO: 21492 - protein, 442 aa, unidentified; identical to SEQ ID NO: 2807

SEQ ID NO: 21493 - protein, 397 aa, unidentified
RAKANGTISKKCVKQATAQNGSVSKRANEIGVIKRHLPGCEKEVLCIGIKNKEAKFSNRTRPEGWLTPTANQLLQTHINLVKKIQKFLPISDVVLEINKFAFMRLDNPNVQKWQYQQGPLYQKASLEEAVSEMQEHHCLFCKNTIDHYHHVVPQHKNGSNTIGNIVGLCAKHHDLVHKDTSWQEKLAKKKTGLNKRYGALSVLNQIIPALTKELSSLFPKHFFATNGKSTYDYRAAHGVSKDHWLDAYCIAGSVLPNDACDNNINNRVPYELKQFRRHDRRALHKENMSRVYTLNGKKVATNRHKAVEQATDSLEEFCQNHPDDVCKLKVKEHHPEYRNPKRNFPGCVFLVGKHTHVMQGTSGSHNGKADGYYDTNGNSYSSGKCKFVVKNEGIVFT

SEQ ID NO: 21494 - protein, 428 aa, unidentified; identical to SEQ ID NO: 7211

SEQ ID NO: 21495 - protein, 410 aa, unidentified
MRGKPLMPCKPRKARLLLKQGKAKVVKRDPFTIQLTIATGEAKQDISLGVDSGSKYIGISATTKKHVLFEAEVELRNDIVKLLADRRQYRRSRRYRKTRYRQARFLNRKKPEGWLAPSIQHKINSHIKIIDMLTKLLPITDITIEVASFDIQKIKNPDIQDKEYQQGDQLGFYNVREYVLWRDNYQCQGRKGCKNKILNVHHIESRKTGGNSPNNLITLCETCHNDYHAGKLKLNLKRGQMFKDATFMGVMRWATYNALKELYPNVKLTYGYITKHKRIKYGLEKSHRMDARCISGNPLVKPLDTYYYFKCVRKQNRQLHKATPSKGGVRKNNKAPRYLHGFQLFDKVSYQNQECFIFGRRTSGYFDLRKLDGTKVTASASVKKLKLIERANTLLCERREGNSSPAYTIF

SEQ ID NO: 21496 - protein, 293 aa, unidentified
MPDKVYVISRLGHPLMPCSPANARHLLDDKKAKVVKRMPFTIRLLYGSTKYIQPIILGVDAGSKTIGLSASTAKEEVFAAEVMPRNDVVENLSTRREFRRARRNRTTRYRKPRSDNRVRSNHERWLAPSVKVKIQEHITSIKRVYTILPISKVVIETAEFDLQLLKAIQEGKPIPEGEDYQKGEMYGSYNVCQYVLWRDNYTCICCGVRGTPKNPVRLHVHHFESRKYGGNAPDNHGTLCDDCHKKFHLGIITDVKLKTRRRQSTRDAAFMGIMRKTLMWRLRTELFIPVAET

SEQ ID NO: 21497 - protein, 451 aa, unidentified; identical to SEQ ID NO: 3199

SEQ ID NO: 21498 - protein, 451 aa, unidentified
VLHARNLSITLAKVSYGLYDAGLPQKIIQKERSTYMVYVLSQNGQPLMPTIRHGKGRRLLKEGKANVVKKCPFTIRLTYPSGDQTQEISLGIDSGSKYIGISATTQKKVLYEAEVELRNDISKLLAARRQNRRSRRSRKTRYRKPRFDNRKRKEGWLAPSVQQKVDCHLKVVEDVCKLLPVTRIIAEVASFDIQKIKDPKIHGTDYQQGDQLGFWNVREYVLFRDGHTCQCCKGKSKDKILNVHHIESRQTGGNAPNNLITLCETCHKGYHKGQVKLPKKIKRGMTFKDAAFMGIMRWAFYDRLKEIYLPLGIDVSLTYGYLTKNTRIAHQLPKTHYLDARCISGHPDAISDGIYYHQKKIRCHNRQLHKANTLKGGIRKRNQAEYLVHGFRLFDKVRYQGKDYFIFGRRKSGYFDIRDLNGEKVNKGSISYKKLRLVETRRSYLTERRLA

SEQ ID NO: 21499 - protein, 412 aa, unidentified
LRVFVLNKRGKPLMPCSPAKARHLLKEKKAIVVRRTPFTIQLTIATGESKQPVSLGVDAGYKYVGLSASTEKAELYASEVELRQGITDLLSARRALRRARRNRKTRYRAPRFDNRIRTKRKGWLAPSVENRINAHLSRIEAVLRLLPVTKITVETASFDMQLLKNPDIAGKEYQEGEQLGFWNVREYVLFRDGHVCQHCYGRSKDPVLNVHHLESRRTGGDSPGNLITLCETCHKALHRGDITLKAKRGKSFRAEAFMGIMRWEVHNRLRALHPGIEVSNTYGYRTKHARIANGIAKSHCADAFCIAGNLGAERLCEFFFQKQTRRNNRQIHKLSILKGGIRKRNQAPFEVKGFRLFDKVACQGEESFIFGRRSSGFFDVRKLDGTRISAGISCKKLHLLEKRRTYLTEIRK

SEQ ID NO: 21500 - protein, 512 aa, unidentified
MSTVYVLNKDGKPLMPTTRCGHVRHLLKEQKARVVTSKPFTIQLLYEADDVVQSLYLGIDPGRTNIGVAVVKANGTAVFTAHLETRNKEIPKLMKKRKESRRARRTNGRRCRRQRRAKANGTISKKCVKHDTAQNGSVSKRAKEIGVIKRHLPGCEKDVLCIGIKNKEAKFSNRTRPEGWLTPTANQLLQTHINLVKKIQKFLPISDVVLEINKFAFMRLDNPNVQKWQYQQGPLYQKANLEETVSEMQEHHCLFCKKKIDHYHHVVPQHKNGSNTIDNIIGLCTQHHDLVHKDATWQKRLAKKKTGLNKKYGALSVLNQIIPALTKELSSLFPKHFFVTNGKSTYDYRAAHGVSKDHWLDAYCIACSVLPNDTCDKTINSRVPYELKQFRRHDRRALNNENMSRVYTFNGKMVATNRHKATEQTTDSLEEFRQRQPNDVCNLKVKEHHPTYRNMNRNYPGSVFLVGNQVHVMQGIAGSKDGEATTYKDTNANSIAAGKCKFVAKNSGILFV

SEQ ID NO: 21501 - protein, 431 aa, unidentified
MPNKVYVINKHGRPLMPCSPAKARHLLDAGKAKVKKRTPFTIQLVYGSSGYTQEVILGVDAGSKTIGVSALTKKEELFAANVIPRNDVVDLLSTRREFRRARRNRKTRYRKPRFDNRVRSKHKGWLAPSVEVKIQEHITAIRRVCGILPVSKVVVETAEFDLQLLKAIADGKPVPQGEDYQKGEMYGHYNVRQYVLWRDDYTCQCCGAHATKKKEVRLHVHHLESRKTGGDASGNLVTLCESCHEKLHKGLITEDDFKKRKRKSTRDATFMGIMRATLLQRLRSELPIPVVETRGYITKATREKLLVLPKSHTNDALAIAQGKHGFNVGYLPGIAQIDKIYTIRPVRHHNRQLHKATILKGGIRKSNQAEKYVFGYRLFDKVQFNGQDCFIWGRRTTGIFTIKTINGKMIKDGISFKKLKPVEKSTGYLIA

SEQ ID NO: 21502 - protein, 427 aa, unidentified; identical to SEQ ID NO: 7675

SEQ ID NO: 21503 - protein, 447 aa, unidentified
VPAYRIKHITKKEAPYMVYVLDIDGQPLMPTSRHRKVRKLLNSHLAKVVKRCPFTIQLLYQSTKETQPVSLGVDAGSRHIGLAATTEQKVVYQEELVPRNDVVKLLSARRALRSSRRSRKTRYRKPRFNNRVHSKHKGWLAPSVEVKIQEHITAIKRICQILPISEIHVETAEFDLQRLKAMDEGSPLPVGIDYQLGEQYDFYNTIQYVLHRDEYTCQCCGTHDNNVKLHVHHIESRQTGGDAPNNLITLCEHCHKLLHAGKTILPKGKKRGKSYRDATFMGIMRKTLLERLKKEIDVPVEGTYGYITKYWRERAGLEKSHINDAICISKHPYARPLETYYLTKAVRHHNRQIHKTKFSKGGIRKRNQAPYLVKGFRLFDKVLYQGESYFIFGRRITGYFDIRTLDGTKVNKGSTSYKKLRIQDTAEAYLTEVRAIPHMNEFTCVLA

SEQ ID NO: 21504 - protein, 515 aa, unidentified
LLRQGRLIVKKVTYMSTVYVLNKDGKPLMPTTRGGHVRHLLKEQKARVVRTNPFTIQLLYETDNLVQPLYLGIDPGRTNIGVAVVKTDGTAVFTAHLETRNKEIPKLMQGRKKARRARRTNGRRCRRQRRAKANGTISKKCVKQATAQNGSVSKRANEIGVIKRHLPGCEKEVLCIGIKNKEAKFSNRTRPEGWLTPTANQLLQTHINLVKKIQKFLPISDVVLEINKFAFMRLDNPNVQKWQYQQGPLYQKASLEEAVSEMQEHHCLFCKNTIDHYHHVVPQSENGSNTIGNIVGLCTKHHDLVHKDTSWQEKLAKKKTGLNKRYGALSVLNQIIPALTKELSSLFPKHFFATNGKSTYDYRAAHGVSKDHWLDAYCIAGSVLPNDACDNNINNHVPYELKQFRRHDRRALHKENMGRVYTLNGKSVATNRHKAIKQTTDSLEEFRQRQPNDVCKLKVKEHHPEYRNPKRNFPGCVFLVGKHTHVMQGTSGSHNGKADGYYDTNGNSYSSGKCK

SEQ ID NO: 21505 - protein, 532 aa, unidentified
MSTVYVLNKDGKPLMPTTRCGHVRHLLKEQKARVVTSKPFTIQLLYEADDVVQSLYLGIDPGRTNIGVAAVKADGTAVFTAHLETRNKEIPKLMKKRKESRRARRTNGRRCRRQRRAKANGTISKKCVKNDTAQNGSVSKRAKEIGVIKRHLPGCEKDVLCIGIKNKEAKYTNRERPEGWLTPTANQLLQTHVNLVKKVQKLLPISDVVLEVNKFAFMRLDNPDIQKWQYQQGPLYKKESLESAVSEMQEHHCLFCKKPIDHYHHVVPKSENGSNTIANIVGLCAEHHNLVHKDVAWQEKLAEEKTGLNKKYGALSVLNQIIPALTNKLSVLFPKHFFVTAGKSTHDYRAAHGVSKDHWLDAYCIACSVLPSNVCDSNINNHVPYELKQFRRHDRRVLHKANMSRVYTLNGKAVATNRHKAIKQTTDSLEEFRQKYPDDVYKLKVKEHHPAYRNLNRNYPGSVFLVGKQAHVMQGIASSKDGKTTKYNDTNATTITAGKCKFVAKNSGILFVQCKFRKALSDGTTKKLQYPV

SEQ ID NO: 21506 - protein, 442 aa, unidentified; identical to SEQ ID NO: 2903

SEQ ID NO: 21507 - protein, 424 aa, unidentified; identical to SEQ ID NO: 3434

SEQ ID NO: 21508 - protein, 406 aa, Geobacillus sp.; identical to SEQ ID NO: 11768

SEQ ID NO: 21509 - protein, 431 aa, Escherichia sp.; identical to SEQ ID NO: 3801

SEQ ID NO: 21510 - protein, 460 aa, unidentified
VQLRQSDAGQSHVLCCLSDKKKGRHNHMYVYVINKHGQPVMPCRPRMARVLLQEGKAAVVKQVPFTIRLLYGSSGYKQPVSLGMDAGSRHIGIAVTTEKKVLYAEELSPRNDVVKLLSVRRQRRRARRSRKTRYRQARFDNRVSSKPKGWIAPSVEVKIQEHISAVMRIQKMLPVSEIHVETAEFDTQRLKALEEGRPVPVGTDYQKGEMYDQYNVRQYVLFRDGYKCKCCGKHGDGVKLHVHHIESRQTGGNAPNNLITLCEDCHKALHAGTIQLPDGRAKRGRSHRDAAFMGIMRKAMVSQLRDIVDIPVTETYGYITKYYRELHHVKKSHISDAIMISRNFKAEPDDTYYASKAVRHHNRQLHKNTILKGGVRKRNQAPRVVKGFRLFDLVRYENSVYYVFGRRKSGFMDIRTLDGRKINKGSISSKKLKFVSTSKGTLVERRKAIPLADKSASFLA

SEQ ID NO: 21511 - protein, 458 aa, Scytonema sp.; identical to SEQ ID NO: 15012

SEQ ID NO: 21512 - protein, 434 aa, unidentified
VLSAWNPFQHWRRITTGRKTEETNLRVLVWNKRGKPLMPCSPAKARLLLKEKKAIVVRRTPFTIQLTIATGETKQPVSLGVDAGYKHVGLSASTEKAELYASEIELRQDITDLLSARRELRRARRNRKTRYRAPRFDNRIRTKRKGWLAPSVENRINAHLSRIEAVLRLLPVTKITVETASFDMQLLKNPDISGKEYQEGEQLGFWNVREYVLFRDGHVCQHCHGGSKDPVLNVHHLESRRTGGDSPGNLITLCETCHKALHRGEITLKAKRGQSFRAEAFMGIMRWEVLNRLKASHPELEVNNTYGYRTKHARISNGIAKSHCADAFCIAGNLGAKRLGEFFFQKQTRRNNRQIHKLSILKHGLRKRNQAPFEIKGFRLFDKVACKGEEGFIFGRRSSGYFDVRKLDGTRISAGISYKKLHLLEKRQTYITCL

SEQ ID NO: 21513 - protein, 502 aa, Flavonifractor sp.; identical to SEQ ID NO: 2616

SEQ ID NO: 21514 - protein, 414 aa, unidentified; identical to SEQ ID NO: 4015

SEQ ID NO: 21515 - protein, 493 aa, unidentified; identical to SEQ ID NO: 3154

SEQ ID NO: 21516 - protein, 426 aa, unidentified
MPKVYVLNRHGRPLMPCTPAKARHLLDAGKAKVRHRTPFTIQLLYGSTGYTQEVILGVDAGSKTIGLSAATETEELFSAEVKPRNDVVELMSARRQFRRARRNRTTRYRKPRFDNRVRSKHKGWLAPSVEVKIQEHMTAILRACAILPVSKVVVETAEFDLQLLKAVAEGKPVPQGEDYQKGEMYGHYNVRQYVLWRDSYTCCICGVHGSVRKGVPLHVHHLESRRVGGDAPDNLVTLCTACHDKLHKGIIMAADIKKRKRRSTRDATFMGIMRMTLLRRLREQLPVPVVETRGYITKATRENLLVLPKSHANDALAIAHGPQGFRAEHLPNIRQADRLYTIRPVRHHNRQLHKATILKGGVRKTNQAEKYICGFRLYDKVLYNGIECFVWGRRTSGSFLLRQLNGEKVKDGVSYKHLKLLERSQS

SEQ ID NO: 21517 - protein, 443 aa, Anoxybacillus sp.; identical to SEQ ID NO: 6339

SEQ ID NO: 21518 - protein, 427 aa, Parasutterella sp.; identical to SEQ ID NO: 4733

SEQ ID NO: 21519 - protein, 431 aa, unidentified
MPNKVYVINKHGRPLMPCSPAKARHLLDAGKAKVKKRTPFTIQLVYGSSGYTQEVILGVDAGSKTIGMSASTTKEELLSAEVKPRNDVVDLLSTRREFRRARRNRKTRYRKPRFDNRVRSKHKGWLAPSVEVKIQEHITSIKRVCRILPVSKVVIETAEFDLQLLKAIADGKPVPQGEDYQKGEMYGHYNVRQYVLWRDNYTCQCCGAHATKKKEVRLHVHHLESRKVGGDAPDNQVTLCESCHEKLHKGLITAKDFKKRKRKSTRDATFMGIMRKTLMQRLCSELPIPVVKTRGYITKATREKLLVLPKSHTNDALAIAQGKHGFNVGYLPGILQIDKIYTIRPVRHHNRQLHKAAILKGGIRKSNQTEKYVFGYRLFDKVQFNGQDCFIWGRRTTGIFTIKTINGKMIKDGISFKKLKPVEKSTSYLIA

SEQ ID NO: 21520 - protein, 410 aa, Geobacillus sp.; identical to SEQ ID NO: 4122

SEQ ID NO: 21521 - protein, 426 aa, unidentified; identical to SEQ ID NO: 3614

SEQ ID NO: 21522 - protein, 258 aa, unidentified
SIVIEVAQFDTQKIKNPEILGKEYQEGDQLGFWNTREYVLARDGHKCQYCKGKSKDKILNVHHLESRKTGGDSPSNLITLCETCHKEYHKGNIDLKIKRGSSLRDAAVMGIMKWKLYEELRSRYDRVSMTFGYITKHNRIKYGIEKSHTSDAFVISMNINAKRIERQYLKRLIRRHNRQIHKMKILKGGKKKNNQAPFEVFGFRLFDKVLYNNKILFVYGRRKSGSFNIRDFNGENSKDVSRKKFKLIRGKRHPIILK

SEQ ID NO: 21523 - protein, 545 aa, unidentified; identical to SEQ ID NO: 5593

SEQ ID NO: 21524 - protein, 420 aa, unidentified
MQYAYVLNKRGEPLMPCSPGKARILLKQQKACVVKRTPFTIKLLHGSAGYKQPITLGVDAGSKHVGLSASTEKRELYSEEFTPRNDVVELLSTRRQNRRSRRNRKTRYRAPRFNNRVHGKHKGWLAPSVEVKIQEHITVIKRICRILPITLVRVETAEFDTQRLKAMLAGKPLPVGTDYQLGEMYDEYNVRQYVLKRDNYTCQCCGAHTTAKKTVKLHVHHLESRKVGGNAPSNLITLCTTCHNNLHKGKITLDGKKRGKTLRDAAFMGIMRNTLLTRLRNELNIPVQNTYGYITKLLREQNDIKKSHVNDARCISKHPLAKPCSVCYRTKAIRHHNRQIHKAKILKGGIRKANQAPYIVKGFRLWDKVLYNEQECFISGRRSSGYFALRKFDGTTITNSISFKKLRLLEPATNYLIERK

SEQ ID NO: 21525 - protein, 427 aa, Oscillochloris sp.; identical to SEQ ID NO: 5291

SEQ ID NO: 21526 - protein, 424 aa, Moorena sp.; identical to SEQ ID NO: 8180

SEQ ID NO: 21527 - protein, 415 aa, unidentified
MENEMAYCFVVDKNNRPLAPTKVNKGWYLVRKGRAKIKSRYPMVIQLEKEVESDKYDESRVVVGIDDGSAHVGLAIVQKCPTKNKVVFKGTIEQRQDVKHLMDVRRGYRRYHRYHKRYRQARFNNRHSSKRSGRLAPSIKQKKDAVLRVLYQLNRWIDIQEYYLEDVCMDIRAMTDGYKPYRWQYQKSSRLDENLRKAAIIRDGCKCQECGRSNCVLEVHHIKARKYGGADTIGNLITLCSGCHQKTEGREREFEDRYFKIIGSKPKRFDYAMHVMQGKNYLRERISELGPLHLTNGGETANKRIEWNIVKSHSNDAICITDCIPDTCDVKEWIIKPMRRKSKAKTDNVLGIRHRDLVSYTYKNGEIHTGYVTALYPELLALNFQSKTKHCKKVNARKCRLLWKFDKIYWLEQCV

SEQ ID NO: 21528 - protein, 420 aa, unidentified; identical to SEQ ID NO: 6693

SEQ ID NO: 21529 - protein, 415 aa, unidentified
MVYVLDKNGHPLMPTSRHGKVHRMLKSGQAKVVRKCPFTIQLLYESEHNVQAVSLGIDAGSKHIGVSATTKTTVLYEADVELRDDIVKLLAIRRQMRSSRRSRKTRYRPKRFDNRRRGEGWLAPSIRQKINTHLVTVAHVCEILPVSQIIVETASFDIQKIKNPEIQGIEYQQGEQMDFWNTREYVLFRDGHVCQCCKGKKKDPILNVHHIESRKTGGNAPNNLITLCETCHKGYHNGTIKLPKKIKRGMKFKDAAFMGIMRWAFYNTLKEKYEPDIPVSMTYGYLTKNTRIRHNLPKEHYIDARCISGNPDAVSDGVYYYQKKVRCHNRQIHKFNTLRKGVRKLNQSEYLVKGYRIFDKVRYQGREYFVFGRRKTGFFDIRTLSGEKANKGSISIKKIAFVDTRKNYITERRTV

SEQ ID NO: 21530 - protein, 459 aa, unidentified
  source 1..459: note = Candidatus Poribacteria bacterium
MRVYVINKNGNPLMPCKPAKARKLLRDKKAKVVNRCPFTIQLLWDCEENVQEVTVGIDKGSDVTGFSCVSNGEILMSGAIHHRTDIKGKMDARRANRRNRRSRKWYRPKRFNNRASSKRSGRLPPSIKANAEEVIRVVRKIPLPISHIVVEDVQVDIRRLSDPDVKNGEYQQSNRLDENLRLACLTRDGFICQKCKKQPPDSRDYGKKQRPEYRDYRSKKETRLEAHHIVWTTKGGKDSIYNLITLCESCHDKVHKKGESGKVKIKGGKVVTGMQKATHDFVLAAGFSDKVAQRTMQGKTLMYQELKKIASLSTVYGYQTSAYRKSLSLPKTHDIDALCVATLYTGAVIRRHRENFYIIKFRPRQTRRQYHDLPRKGKGRVRYQINSELEGFRKGDVVRVKGRWLKQINSIYSNGYLAFARVSGEPNSAKPKDCQLLQRGQTVIWEKVVDQEGGIVVNV

SEQ ID NO: 21531 - protein, 431 aa, unidentified
MPDKVYVISRLGHPLMPCSPAKARHLLDDKKAKVVKRMPFTIRLLYGSTKYIQPIILGVDAGSKTIGLSASTAKEEVFAAEVMPRNDVVENLSTRREFRRARRNRTTRYRKPRSDNRVRSNHERRLAPSVKVKIQEHITSIKRVCTILPISKVVIETAEFDLQLLKAIQEGKPIPEGEDYQKGEMYGSYNVCQYVLWRDNYTCICCGVRGTPKNPVRLHVHHFESRKYSGNAPDNHGTLCDDCHKKFHLGIITDVKLKTRRRQSTRDAAFMGIMRKTLMWRLRTELFIPVAETKGYITKATREKLLALPKSHTRDALAIAQGRRGFGIKEYAYVEPANHIYTVRPVRHHNRQLHKASILKGGIRKRNQASKYVFGFRLYDKVLYQGKACFVWGRRTSGTFLLRTIDGIKVKDGVSYRNLTLLERSSNYLIA

SEQ ID NO: 21532 - protein, 348 aa, Anoxybacillus sp.; identical to SEQ ID NO: 18653

SEQ ID NO: 21533 - protein, 241 aa, unidentified; identical to SEQ ID NO: 3977

SEQ ID NO: 21534 - protein, 406 aa, unidentified
MVYVQDIDGKPLMPTTRHGKVRRLLKSNKAVVVNLCPFTIRLTYISDSYKQEIVLGVDAGTKHVGLSATTKSKELYSSEVILRNDIVDLLSTRRELRKARRNRLRYRKPRFDNRVKSKRPGWIAPSVKYKVDAHIRVVENVCSILPISRIVIEVAQFDTQKIKNPEISGKEYQEGDQLEFWNTREYVLARDGHKCQYCKGKSKDSILNVHHIESRKTGGDSPSNLITLCETCHKEYHKGNIDLKIRRGKSLRDAAVMEIMKWRLYEELKSRYDRVFMTFGYITKHNRIKYGIEKSHTSDAFVISKNINAKRIERQYLKRLIRRHNRQIHKMKILKGGKKKNNQAPFEVFGFRLFDKVLYNNKIFFVYGRRKSGSFNIRDFNGENSKDVSRKKFKLIRGKRHPIILK

SEQ ID NO: 21535 - protein, 539 aa, Marinobacter sp.; identical to SEQ ID NO: 10373

SEQ ID NO: 21536 - protein, 424 aa, unidentified
MVYVISQDGNPLMPCSNPIARLLLKQGKANVKKRNPFTIQLTYETTNYTQNLTLGVDTGSGTFGTAVSKDNGGIVYMSEVVVRNDISSKMKQRTTYRRNRRSRKTRYRKARWLNRANSRKTERFSLTMKSKLHSHVKEIKFIQSILPIKEMIFETGQFDPHLMKDPSLADQKAKLWKYQKGTNYGFENTKAMVRNRDHYTCQCCKGKHKDKKLEVHHIVFRSQGGSDEESNLITLCHTCHTKLHHGLIKLKLSGKKAGTLKYATQMNSIRKQLLRLYPDAIETFGYITNANRLHLGIEKEHYYDACVIASQGNAFSVKSNLYKKKCISDGDFQKTKGVRSEQPIITDKIYGFRKFDKVRYFGKDYFIKGRMSTGYAILMDIDGKKIDFSFMPKGYKTPKLVNLKRLEARSSWIVTTEEVTPNIA

SEQ ID NO: 21537 - protein, 419 aa, Anoxybacillus sp.; identical to SEQ ID NO: 5328

SEQ ID NO: 21538 - protein, 545 aa, unidentified
VQFAWWLCHPKPSDNIEDVNHETALMLLQIKAGTETFGTAPCGSGPKAEGVSPERKAMNTVAVVTNTNKPLMPTSPYRARKLLSSGKAKIVKHRPFTILLVNRSDGNVQEIEYKSDTGYLHVGISVCSEKREFVREQRDLLPDEKEKHNDRRKYRRTRRNRKRYRKARFDNRIGKIRKKEKNEHVWLPPSLEHKVDAQVQLFLRLYQVMPVKRAVFEMGQFDPALMKALEKGEAAPQGIDYQMGERYQIATRRAAVFTRDRYACVFCGRSIKDHAILHVHHIGFWKQDRSNRLDNLATCCEQCHTSENHRPGGILYGVEPKLESLASATYMNVVRFELLRRLKEAAPDVEFHISYGAKTSVIRKQRSISKSHTNDAYCLGQYFPKLRAEEIGFQKIRRNDRILQKFYDAEYLDSRDGTTKKGKELTNGRISRNHKKDHENLHQYRGKKLSKGRITIRRGRSSLKPGGLVRFDGEVLTVHGTHRSRKKNKAGHIKVSVNVEFERPSKTGRKSAALSKCQIISRSYNTGWKQIQLRKEEQGRIAAVV

SEQ ID NO: 21539 - protein, 431 aa, unidentified; identical to SEQ ID NO: 4306

SEQ ID NO: 21540 - protein, 412 aa, unidentified
MVYVISQDGKPLMPCSNPIARLLLKQGKAKVKKREPFTIKLTYEAPNYTQDLTLGVDTGSGTIGTAVSKDNGDIVYMSEVIVRNDITDKMTQRVKYRRNRRNRKIRYRKARWLNRANSIKNDRFSPTMQSKLHSHVKEIEYIKSILPITEMVFETGQFDTHFMKNPSLANPKVKHWGYQKGTNYGFENTKAMVLNRDSYTCQCCKGKHKDSKLEVHHIVFRSQGGSDEESNLITLCHTCHKDLHSGKINPKLSGKVKGNLKYATQMNSIRKQLFRLYPNAIETFGYVTKANRLHLGVNKEHYYDACTIATQGNAFNVKSNLYKKKCVSDGDFQKTKGVCSEQPIVTDKICGLDCQHFFRQIFLGYFSDIVQAFDTLRKNVCGDDYTSLHNPIVLSSVLPAYGMFHSIQILFL

SEQ ID NO: 21541 - protein, 418 aa, unidentified; identical to SEQ ID NO: 20220

SEQ ID NO: 21542 - protein, 411 aa, unidentified
MPCSQRKARLLLKNKKAKIYAYHPFTIQLFYASGETIQKCNIGVDTGSRHIGLAITSENKVLFKGEIDLRQDVKSNLDTRRTYRRNRRNRKTRYRKARFFNRVKSKQKNWLPPSIESKIHHTFHWIHKLENLVDDSKLHIEVGKFDVAKMIHPDIQGEDYQQGQCYGYFDTRYFVFARDDYTCQCCKKKNKILRTHHIRYRSNGGTDRADNLITVCTDCHTSKNHKKGGILYEWQQRHKKVKQYKEPPFMNIIRKRIYQKYPDAVISYGSQTTPKRKERNLDKTHYNDAIIISGIEDIKENPKEWLRIKQFRKKKRSLHEAAARKGRKEHNRTQKRNRKNTSYDKGWYLNDYVEVFGKKGYISGFTNSGVYIKNTNDDYITMPDKKYKQVSLCNIVRICHNNNWQYEIQKI

SEQ ID NO: 21543 - protein, 382 aa, unidentified
LRVFLEQTRKTADAGYKHVGLSASTEKAELYASQVELRQDITDLLSARRALRRARRNRKTRYRAPRFDNRIRTKCEGWLAPSVENRINAYLSRIEAVLRLLPITKITVETASFDTQLLKSPDIAGEEYQKGEQLGFWNVREYVLFRDGHVCQHCHGRSKDPVLNVHHLESRRTGGDSPGNLITLCETCHKELHRGEITLKAKRGQSFRAETFMGIMRWEVLDRLKASHPKLEVQNTYGYRTKHARIVNGIAKSHCADAFCIAGNLGAERLGEFLFQKQTRRNNRQIHKLSILKGGIRKRNQVPFEVKGFRLFDKVACKGEEGFIFGRRSSGYFDVRKLDGTRISAGISYKKLRLLEKRQTYLTEIRKEEALPPLPEGRGLRA

SEQ ID NO: 21544 - protein, 465 aa, unidentified; identical to SEQ ID NO: 9124

SEQ ID NO: 21545 - protein, 424 aa, unidentified; identical to SEQ ID NO: 3434

SEQ ID NO: 21546 - protein, 415 aa, unidentified; identical to SEQ ID NO: 4542

SEQ ID NO: 21547 - protein, 456 aa, Halomonas sp.; identical to SEQ ID NO: 2881

SEQ ID NO: 21548 - protein, 457 aa, unidentified; identical to SEQ ID NO: 3236

SEQ ID NO: 21549 - protein, 490 aa, Anaerostipes sp.; identical to SEQ ID NO: 6170

SEQ ID NO: 21550 - protein, 442 aa, unidentified; identical to SEQ ID NO: 4449

SEQ ID NO: 21551 - protein, 477 aa, unidentified; identical to SEQ ID NO: 17358

SEQ ID NO: 21552 - protein, 447 aa, unidentified; identical to SEQ ID NO: 5316

SEQ ID NO: 21553 - protein, 406 aa, unidentified; identical to SEQ ID NO: 5200

SEQ ID NO: 21554 - protein, 428 aa, unidentified
LKVFVLNMRGQPLMPCSPAKARHLLKAGKAVVKRRTPFTIQLRIATGETKQNVTLGVDAGAKHVGLSATTEKEEVFASEVELRQDITGLLAARLSLRRDRRHRKTRYRAPRFLNRVRSKHKGWLAPSVENRIQAHMSRIDAVCRLLSVTKIVIETASFDIQKIKDPSVEGTDYQQGDQLGFWNVREYVLFRDGHVCQHCHGRSKDKILNVHHLESRQTGGDAPNNLITLCETCHKAYHAGKIKLKVKRGQSFRAEAFMGIMRWTLLDRVRKAHPGLPVENTYGYLTKHTRIPHGLPKTHCVDAYCIAGNLKAVRRGVYLHQRQMRKHNRQIHKFTVLSKRLEDGTKIGYRKLNQSPYLVHGFRLFDKVRCLGQIGFIFGRRSSGYFDVRRLDGVKLSPSISWRKLTLLEKRSTYLTELRKQDGASSPV

SEQ ID NO: 21555 - protein, 397 aa, unidentified
IVKRRTPFTIQLTIATGESKQPVTLGVDAGYKHVGLSASTEKAELYASEVELRQDVSDLLSARRALRQSRRSRNTRYRAPRFDNRIRTKRKGWLAPTVENRINVHLSRIETVLRLLPVTKITVETASFDTQLLKNPDIAGKEYQEGEQLGFWNVREYVLFRDGHVCQHCHGRSKDPVLNVHHLESRRTGGDSPDNLITLCETCHKALHRGDITLKAKRGKSFRAEAFMGIMRWEVHNRLRALHPGIEVSNTYGYRTKHARIANGIAKSHCADAFCIAGNLGAERLCEFFFQKQTRRNNRQIHKLSILKGGIRKRNQAPFEVKGFRLFDKVACQGEEGFIFGRRSSGFFDVRKLDGTRISAGISCKKLHLLEKRRTYLTEIRKEEALPPLPEGRGLRA

SEQ ID NO: 21556 - protein, 515 aa, unidentified; identical to SEQ ID NO: 5017

SEQ ID NO: 21557 - protein, 416 aa, unidentified
MIAAYVLDINGSPLMPMHNFKKVRKLLKEKKAKVVSREPFVIRLLYEPKTHIVEDCVLGIDTGSKTIGASVFCNGEILYASEVEIRNDIKIKMDRRRMYRRDRRNRKTRYRKTRFLNRGNSTKKGRYSPTLKSKFDSHVREIEFIKSILPIKHLVLETGSFDTHKLKNPNVKGWGYQRGINYGYANARAHALDRDNYTCQICGAKNTRLEVHHIKYRSQGGSDDLENLITLCEDCHHNLHKGKIELKVKGKKKSSLKHATQMSVIRSMLLKEYPEAIETFGYITKQNRWTLGLDKTHYIDAAVISSEGKSIKFNCDLYLKRHIAKSEYKLAKGLRSERKINMGKIHGFRKWDKVLYMGTEYFIKARRTRGVFELENIYKEKIDFSYMPRGFKTVKVSNLIRLSARSTTLCIRTKIS

SEQ ID NO: 21558 - protein, 426 aa, unidentified; identical to SEQ ID NO: 3964
  source 1..426: note = Cyanobacteria bacterium UBA11148

SEQ ID NO: 21559 - protein, 431 aa, unidentified; identical to SEQ ID NO: 11677

SEQ ID NO: 21560 - protein, 416 aa, unidentified
MVYVLSQNGQPLMPTGNHAKVRVLLNQRKAKVIKRCPFTIQLQYESTTHTQKINLGIDAGSKTIGVSATTDSKVLYESEVVLRNDIVELLSGRRALRNSRRSRKTRYRKPRFDNRKKPDGWLAPSIRQKIETHVTVVGNVMKILPVTKIIVETASFDIQKIKNPEIEGEGYQHGEQLDFWNVREYVLFRDGHTCQCCKGKSKDNILNVHHIESRKTGGNAPNNLITLCETCHKAYHKGIITLPKEIHRGMRFRDAAFMGIMRWAFYDRLKELYNPLGAEVINTYGYITKNTRIEHGLPKEHYVDARCISDNPAAKPLDHYYFQKKVRCHNRQIHKNTILKGGIRKRNQASYEVKGFRLYDQVLWKGQKCFIFGRRSTGRMDLRLLDGTHINASVGHKNLKLLSMRKNYLIEQRKAG

SEQ ID NO: 21561 - protein, 448 aa, Deinococcus sp.; identical to SEQ ID NO: 7409

SEQ ID NO: 21562 - protein, 379 aa, Halomonas sp.
HVLCLFELIHRGYQIKKALQQRAAFRRRRRSANLRYRAPRFNNRTKPKGWLAPSLQHRVDTVTAWVNRLNRLAPVTAISQELVRFDTQKLDNPEINGVEYQQGTLLGYEVREYLLEKWGRECAYCGTADTPLEIEHVIPRSRGGSNRVSNLTLSCHPCNQSKDALSLVDFFATDKGLKKRLKANGHTANARLERVQRQLKQPLRDASAINATRWALFNALKATSLPVAVGTGGRTKYNRQRLGIPKTHALDAACVGAFDALHAWQVPTLTIKAMGRGSYQRTRLTKHGFPRGYLMRQKQVHGFQTGDMVRAMVPTGKKAGTHTGRVAVRKTGSFNIQTEQGAVQGISHKYCTLIQRGDGYGYHFTPFTHLTGGAGQAVA

SEQ ID NO: 21563 - protein, 225 aa, unidentified
MVYVQDIDGKPMMPTTRHGKVRRLLKDNKAVVVNTCPFTIKLTYKTSDYKQEIVLGVDAGTKHVGLSATTKSKELYSGEVILRNDVVELLSTRRESRRARRNRLRYRKPRFENRVKSKRLGWVAPSVRHKVDAHIRVIDNICSTLPISRIIVEIAQFDTQKIKNPDISGNEYQEGDQLGFWNVREYVLARDGHKCQHCKGKSKDPILNVHHIESRKTGGDSPSIS

SEQ ID NO: 21564 - protein, 493 aa, unidentified; identical to SEQ ID NO: 3781

SEQ ID NO: 21565 - protein, 337 aa, unidentified
MPCSPAKARLLLKEKKAIVKRRTPFTIQLTIATGESKQPVTLGVDAGYKHVGLSASTEKAELYASEVELRQDVSDLLSARRALRQSRRNRKTRYRAPRFNNRLRTKRKGWLAPSVENRINAHLSRIEAVLRLLPVTKISVETASFDMQLLKNPDIAGKEYPEGEQLGFWNVREYVLFRDRHVCQHCYGRSKDPVLNVHHLESRRTGGDSPGNLITLCETCHKALHRGDITLKAKRGKSFRAEAFMGIMRWEVHNRLRALHPGIEVSNTYGYRTKQARTNRERHRQVALCGCFLHRRQPRRRKALRILLPEADAPEPPADSQALHPQRRHSKAQSGSL

SEQ ID NO: 21566 - protein, 417 aa, Streptomyces sp.; identical to SEQ ID NO: 20109

SEQ ID NO: 21567 - protein, 480 aa, unidentified
LYTKPLDNIGEGSLPPSGEINLKGMTFMVYVKSIDGKALMPTSNSKARKLLKQKKAKVVSLRPFVVKLTYKTKTEYIQKLNLGVDSGYSNIGFSVIDAKQEYIAGEVKLLEGMKKRLLEKASYRRIRRSRLRYRKARWNNRVKSKKKGWLAPSLKHKLDTHIKFIDYLKNILPIGKITIEVANFDIQKMKDDLISGIDYQNGDMFGFWNVREFVLHRDGHKCQNPNCKHKDKKEQILKVHHIRYRSEGGSDRPENLITLCSKCHTPANHKKGKFLYDWCVNGKKVRGFKDATFMSMIRWYLVNELKSKHNNVSITYGYITKNHRIQNGIEKSHLNDAFAIAKGTNQARTKDRFLVIQDRLKNRSLEKFYDSKIIDIRTEKKVSGGDLNCGRSTRNKNLNTENLRKYRGVKISKGQRRIRKQKYFYQPNDLVKYDGKVYTVKGTQNEGKYIALKEIKKVPKVELLIPYVFKKGLNWSYGLC

SEQ ID NO: 21568 - protein, 375 aa, unidentified
MPCSPAKARLLLKEKKAIVVRRTPFTIQLTIATGESKQPVSLGVDAGYKHVGLSASTEKAELYASEVELRKDITDLLSARRALRQSRRNRKTRYRAPRFDNRIRTKRKGWLAPSVENRINAHLSRIEAVLRLLPITKITVETASFDMQRLKNPDISGKEYQEGEQLGFWNVREYVLFRDGHVCRHCHGRSKDPVLNVHHLESRRTGSDSPDNLITLCETCHKALHRGEITLKAKRGQSFRAQAFMGIMRREVLNRLKASYPELKVHETYGYLTKHARIANGIVKSHGADAFCIAGNLGAERLGEFFFQKQTRRNNRQIHKLSILKGGIRKLDGTRISAGISCKKLRLLEKRRTYLTEIRKEEALPPLPEGRGLRA

SEQ ID NO: 21569 - protein, 436 aa, unidentified; identical to SEQ ID NO: 19272

SEQ ID NO: 21570 - protein, 328 aa, unidentified
MVYVLANDGQPLMPTERHGKVCRMLKSGIAKVVKKCPFTIQLQYESERNVQPVALGIDAGSKHVGVSATTKAKVLYESDVELRDDIVKLLATRRQLRRRRRSRKTRYRPARFDNRRRKEGWLAPSIRQKIGSHLTVVANVCKILPVSQIIVETASFDIQKIKNPDIQGIEYQQGEQMDFWNIREYVLFRDGHTCQCCKGKSKDKVLNVHHIESRKTGGNAPNNLITLCETCHKGYHNGTVTLPKNIKRGMKFKDAAFMGIMRWTFYNTLKEQYEPDIPVHYTYGYITKNTRINHNLPKGHCIDARCISGNPDAVSDGTYYYQKKVRCH

SEQ ID NO: 21571 - protein, 512 aa, unidentified
MSTVYVLNKDGKPLMPTTRGGHVRHLLKEQKARVVRAKPFTIQLLYETNDVVQPLYLGIDPGRTNIGVAVVKANGTAVFTAHLETRNKEIPKLMQDRKKARRARRTNGRRCRRQRRAKANGTISKKCVKQTTAQNGSVSKRAKDIGVIKRRLPGCEKDVLCIGIKNKETKFTNRTRPEGWLTPTANQLLQTHINLVKKIQKFLPISDVVLEVNKFAFMRLDNPNIQKWQYQQGPLYKKESLESAVSEIQEHHCLFCKKPIDHYHHVVPQHKNGSNTIANIVGLCAEHHNLVHKDVAWQEKLAEEKTGLNKKYGALSVLNQIIPALTNELSSLFPKHSFVTNGKSTYDYRAAHGVSKDHWLDAYCIACSVLPSNVCDSNINNHMPYVLKQFRRHDRRVLNNENMNRVYTLNNKAVAINRHKAKDQKTVSLEEFRKEHPDDVCKLKVKEHHPTYRNMNRNFPGSVFLVGKQIHVMQGIASSKDGKATKYNDTSATAIAAGKCKFVAKNTGILFV

SEQ ID NO: 21572 - protein, 451 aa, unidentified
MSVAVMSKTGMRLMPTSEYRARKLLKSKKATVYRYNPFTIQLTERETGDVQTVELCMDTGYLHIGTSVKSEKHEYLGVQIDTLTDEKQKHDACRMYRRQRRSRKRYRQSRFNNRKRSDGWIAPSLEHKKDIHIQTISRICNAMPITNITLEMGNFDTQVLKALEENRPLPQGTDYQHGERYGIATLREAVFARDKYTCQCCRKTIADGAILHVHHIIYRSRGGTNRMSNLATACDRCHTPANHKPGGRLYNWKPKIASFKGATFMTAVRWKMYNEVKSKFSDINIHITYGAETKEQRRAFDITKSHVNDALVMGQFHPKHRSRPVCYKKKRRNNRCLEKFYDAKYIDSRDGKKRSGQELFNGRINRNHKKDSENLHQYRQQKVSAGRRTIRKQHYSIQPHDIIVFNRQQFETFGCHCNGARAILLPQKKSVAIKKLSVHKYAGGYFKSDFT

SEQ ID NO: 21573 - protein, 502 aa, unidentified; identical to SEQ ID NO: 2616

SEQ ID NO: 21574 - protein, 406 aa, unidentified
MVYVQDIDGKPLMPTTRHGKVRRLLKSNKAVVVNLCPFTIRLTYISDSYKQEIVLGVDAGTKHVGLSATTKSKELYSSEVILRNDIVDLLSTRRELRRARRDRMRYRKPRFNNRIKSKRPEWVAPSVRYKVDAHIRVVENVCSILPISRIVIEVAQFDTQKIKNPEISGKEYQEGDQLEFWNTREYVLARDGHKCQYCKGKSKDSILNVHHIESRKTGGDSPSNLITLCETCHKEYHKGNIDLKIRRGKSLRDAAVMGIMKWRLYEELKSRYDRVFMTFGYITKHNRIKYGIEKSHTSDAFVISKNINAKRIERQYLKRLIRRHNRQIHKMKILKGGKKKNNQAPFEVFGFRLFDRVLYNNKIFFVYGRRKSGSFNIRDFNGENSKDVSRKKFKLIRGKRHPIILK

SEQ ID NO: 21575 - protein, 406 aa, unidentified; identical to SEQ ID NO: 3415

SEQ ID NO: 21576 - protein, 453 aa, Lactobacillus sp.; identical to SEQ ID NO: 2687

SEQ ID NO: 21577 - protein, 420 aa, unidentified; identical to SEQ ID NO: 3685

SEQ ID NO: 21578 - protein, 416 aa, unidentified
MVYVLDKNGQPLMPTDRHRKVRLMLQSGQAKVIKRCPFTIQLNYDSGHQTQEISLGIDAGSKHIGVSTTTKIKVLYEADVELRNDIVDLLSSRRELRRGRRNRKTRYRQAKFNNRRRGNGWLAPSIRQKIGTHLTVVENICKILPISRIMVETASFDIQKIKNPDIQGAEYQQGDQLEFWNVREYVLFRDGHTCQYCKGKSKDKILNVHHIESRKTGGNAPNNLITLCETCHTGYHKGTVQLPKAIKRGMRFKDAAFMGIMRWAFYEALKQQYEPVGTPVHNTYGYITKHTRIAYNLPKEHYVDARCISGNPEASSNGEYYYQKKVRCHNRQIHKLTVLKGGIRKQNQATYLVKGYRLFDKVSYQGKGYFVFGRRQSGFFDIRTLSGEKVNKGSLSCKKLKFIATRTYYLTERRAV

SEQ ID NO: 21579 - protein, 412 aa, unidentified; identical to SEQ ID NO: 11530

SEQ ID NO: 21580 - protein, 480 aa, unidentified; identical to SEQ ID NO: 5187

SEQ ID NO: 21581 - protein, 556 aa, unidentified
LYIKMTSCTCTVFPAYNYAKTSSSQGKHNLLLRQERLIVKEVAYMSTVYVLNKDGKPLMPTTRCGHVRHLLKEQKARVVTSKPFTIQLLYEADDVVQSLYLGIDPGRTNIGVAVVKADGTAVFTAHLETRNKEIPKLMKKRKESRRARRTNGRRCRRQRRAKANGTISKKCVKHDTAQNGSVSKRAKEIGVIKRHLPGCEKDVLCIGIKNKEAKFSNRTRPEGWLTPTANQLLQTHINLVKKIQKFLPISDVVLEINKFAFMRLDNPNVQKWQYQQGPLYQKANLEETVSEMQEHHCLFCKKKIDHYHHVVPQHKNGSNTIGNIVGLCAKHHDLVHKDSAWEKKLAKKSTGLYKKYGALGVLNQIIPTLTNELSSLFPKHSFVTNGKSTYDYRAAHGVSKDHWLDAYCIACSVLPSNVCDSNINNHMPYVLKQFRRHDRRVLNNENMNRVYTLNNKAVAINRHKAKDQKTVSLEEFRKEHPDDVCKLKVKEHHPTYRNMNRNFPGSVFLVGKQIHVMQGIASSKDGKATKYNDTSATAIAAGKCKFVAKNTGILFV

SEQ ID NO: 21582 - protein, 413 aa, unidentified
MTNYVFVLDANGKQLAPTKEAKAWFLIRKKRATLVSKYPMVIQLNKEISDDEICKDEIRCGIDDVGLHVGIALVQKCQAKNKVIFKGTIEQRNDVKHLMDVRRGYRRYHRCHKRHRQARFNNRSSSKRDGKIAPSILQKRQATVRVINQLNKWINITNYWLEDVSIDIRALTDGYKSYRWQYQKSNRLDENIRKAVILRDECKCMECGKSNCRLEVHHIRPRRLNGSNTLSNLITLCEKCHQKTEGREELFMDKYFSLLKSSDNKNLNYAQHVMIGKKWLREQLSNLGILYLTNGGDTANKRINWNIEKSHSNDAICITDLQPDTCNIKEWSIKPMRRQSKAKTDNVLGINHRDLVEYTFKNGETHKGYVTALYPKQNAINFQSLTKHCKKVNAKKCRLLWKFSKIYWLDNVF

SEQ ID NO: 21583 - protein, 480 aa, Dorea sp.; identical to SEQ ID NO: 2726

SEQ ID NO: 21584 - protein, 442 aa, Lactobacillus sp.; identical to SEQ ID NO: 9501

SEQ ID NO: 21585 - protein, 434 aa, Anoxybacillus sp.; identical to SEQ ID NO: 3421

SEQ ID NO: 21586 - protein, 428 aa, unidentified; identical to SEQ ID NO: 6748

SEQ ID NO: 21587 - protein, 423 aa, unidentified
MVYVLNIDGQPLMPTDRHGKVRHLLKDGRAEVVKCCPFTIRLLYDSTHYTQDIVLGVDAGSKHIGLSGTTETKELYASDVELRNDIVDLISTRRQNRRFRRNRKTRYRKARFLNRLSDKKDWLAPSIRQKVDTHMTVVSRVCKILPVTKIIVETASFDIQKIKDPDISGTGYQHGEQLDFWNVREYVLFRDGHTCQCCKGKSKDPVLNVHHIESRKTGGDAPNNLITLCETCHKGYHSGAVQLPKAIHRGMRFKDAAFMGIMRWAFYNKLKEVYEPQDIEIRMTFGYLTKNTRIRHHLPKEHYIDARCISGHPEAIPNNEVFYQKKVRCHNRQIHKNTILKGGIRKRNQTGYLVKGFRLFDKVAYKGREYFIFGRRQSGFFDLRNLSGCKVNKGSLSYRKIGFLEPRQYYLCERRVMDTQGCA

SEQ ID NO: 21588 - protein, 502 aa, unidentified; identical to SEQ ID NO: 16737

SEQ ID NO: 21589 - protein, 415 aa, unidentified; identical to SEQ ID NO: 3018

SEQ ID NO: 21590 - protein, 416 aa, unidentified; identical to SEQ ID NO: 6135

SEQ ID NO: 21591 - protein, 402 aa, unidentified
MTALEEKLSKTEYIYVLGFDGKPQMPTRRKRHVLKLLKTGRARIAEDIPFTIRLTYRNSPVLQPVTLAEDPGRTNIGAAVLSPLGGLLFAAVIETRNKEIKKLMADRQKSRQASRRGERKARQRLAKRYGSMVKSGMVMRKLPMYAADKFVTCKFIRNTQARFCNRKRCPDWITPTVQHLVQTHLNIIRKISRYLPVTDIAFEVNRFAFMHMENPKAMGVDFQNGPLKGYDDVKEAICTQQHGKCLMCKKPISHFHHIVPRSRGGSDTIQNLAGLCPECHTKVHTDTTFRKDFDRKKSGQLKKYGALSALNQAVPFICKKLLEEYGEEHVHFCGGLDTSLIRTALGFEKTKKNQMHEVDAYCIGLAALEVNEVETPAFDHTFQIRQFRRQDRSIICLLYTSD

SEQ ID NO: 21592 - protein, 413 aa, unidentified; identical to SEQ ID NO: 2636

SEQ ID NO: 21593 - protein, 532 aa, unidentified
MSTVYVLNKDGKPLMPTTRGGHVRHLLKEQKARVVQSNPFTIQLLYETNDAVQPLYLGIDPGRTNIGVAVVKADGTAVFTAHLKSRNKEIPKLMQDRKRARRARRTNGRRHRRQRRAKANGTISKKCVKQTTTQNGSVSKRAKEIGIIKRHLPGCEKDVLCIGIKNKEAKYTNRERPEGWLTPTANQLLQTHVNLVKKVQKLLPISDVVLEVNKFAFMRLDNPDIQKWQYQQGPLYKKESLESAVSEMQEHHCLFCKKPIDHYHHVVPKSENGSNTIANIVGLCAEHHNLVHKDVAWQEKLAEEKTGLNKKYGALSVLNQIIPALTNKLSVLFPKHFFVTAGKSTHDYRAAHGVSKDHWLDAYCIACSVLPSNVCDSNINNHVPYELKQFRRHDRRVLHKANMSRVYTLNGKAVATNRHKAIKQTTDSLEEFRQNYPDDVYKLKVKEHHPAYRNLNRNYPGSVFLVGKQAHVMQGIASSKDGKTTKYNDTNATTITAGKCKFVAKNSGILFVQCKFRKALSDGTTKKLQYPV

SEQ ID NO: 21594 - protein, 462 aa, unidentified
MSVLVIGQNGRALMPTTTRKARILLKENKASVVCRHPFTIHLWYKTGCATQEGSIGIDTGSQHIGVGVTCRNKVILKDEHELRSSMEKRSLMETRATMRRGRRYRKVRYRKPKWRHHTKRMYFEKANRKGQHWRKVKTTTQSPRPERWLPPSLQSKCDHHFRIIDRYLKYLPDSITKNLVIEVGRFDMAHMNDPTIHGEMYQRGPMYDTENLRAYIFARDGYKCACCKAKAGSIRKKDGTSVKLVAHHIQFRSRGATDNPKYMISVCDHCHTTKAHQLGGILYSWMETNKKVTRGLRDATFMNILRRRLFDGYPQAAFTYGNITAVDRKRLLLPKSHANDAVAISLFGKDVSVINATCQTLRYKQVRKSKRSLHEATPRIGRKEPNTKAIRNKKNTTHVNGFKLWDSVLVNGQKLFICGFTGSSAYLVDQDGHYVSPPGKTYKQWTLSKLSRLHPNGNWLMA

SEQ ID NO: 21595 - protein, 536 aa, unidentified
VLRPRYQYPTRWYPSREQGSGNGCLSGEENTDLEQEVSGTLSKGDHSHPGEQDFCVPAITIQGGPAMSVFVVGLNGCRLMPTSERKARLLLKHGKASVYRKVPFTIKLNYKTGSTTQSGYLGIDTGSQHIGVSVVREDGVVLHKEEIGLRDSMSKRKLMQSRASSRRGRRHRKTRYRHPKWRPKAKRVYCEIPDRKGRHWKKKEITFASKRAKGWLPPSLQSKTDHHIWWIKKLQDLLPEGYRLSIELGRFDPARLKDPEIHGELYQKGPQYDYENVRAYVLNRDRYTCQVCGKKGGKLHVHHILYRSHGATDDPQYMATVCSDCHNTENHQQGGILYQWMQKQKKFTRGLRDATFMNILRKRLIEAFPGATFTYGNITKADRERLRLPKSHGNDATAIAIVKTGIMTVKDKEPVIYIQQVRRKKRSLHEETPRKGRKEPNRKASRYDKNTKAVTVTKRKNKKKITITGCLFDRVELNGKKGWISGFTDKSCYVKDENDQYIRTSPKYKQVSLSKLKILHHCGNWAIGARQSLGKG

SEQ ID NO: 21596 - protein, 340 aa, unidentified; identical to SEQ ID NO: 21471

SEQ ID NO: 21597 - protein, 423 aa, Arthrospira sp.; identical to SEQ ID NO: 3469

SEQ ID NO: 21598 - protein, 296 aa, unidentified
INAHLSRIEAVLRLLPVTKITVETASFDLQLLKNPDISGKEYQEGEQLGFWNIREYVLCRDGHVCQHCYGRSKDPVLNVHHLESRRTGGDSPGNLITLCETCHKALHRGEITLKAKRGQSFRAEAFMGIMRWEVHNRLRALHPGIEVSNTYGYRTKHARIANGIAKSHCADAFCIAGNLGAERLCEFFFQKQTRRNNRQIHKLSILKGGIRKRNQAPFEVKGFRLFDKVACQGEEGFIFGRRSSGFFDVRKLDGTRISAGISCKKLHLLEKRRTYLTEIRKEEALPPLPEGRGLRA

SEQ ID NO: 21599 - protein, 419 aa, unidentified; identical to SEQ ID NO: 17238

SEQ ID NO: 21600 - protein, 515 aa, unidentified; identical to SEQ ID NO: 20306

SEQ ID NO: 21601 - protein, 415 aa, unidentified; identical to SEQ ID NO: 2764

SEQ ID NO: 21602 - protein, 447 aa, unidentified
MVAVLSKTGIRLMPTSSYRARKLLARKKAVIAGYRPFTIRLTERESGEIQPIEYTIDTGYYHIGNSVKTVKHELAAVEVRTLMDEKLRQEDRHRYRRQRRSRLRYRAARFDNRRRREGWLAPSVRHRMEQNLSVLNRIARVVPVSRIVMEMGQFDTQVLKAVASGIPLPQGADYQQGDRYGIATLREAVFTRDNYTCQCCGKKGTDGVILHVHHIRYRSQGGTDAMSNLATVCYKCHTPKNHKPGGILYGWKLKLPSFKGATFMTSVRWMLYHQVKELYPELEIQLTYGAATKEQRRILDVPESHVNDAYTMGDFHPSHRVRPVIYQKKRRNNRVLEKFYDAKYIDLRDGKKHSGQELFNGRTNRNHNRDTENLHKYRGKKVSKGRRSIRRRRYPFQPHDLVVYRGKSLETAGCHNKGTRLLIGKRSIAVKEVKIRQYCGGYFAVEI

SEQ ID NO: 21603 - protein, 434 aa, unidentified; identical to SEQ ID NO: 2893

SEQ ID NO: 21604 - protein, 509 aa, unidentified
VYVLNKDGKPLMPTTRCGHVRRLLKEQKAQVVTSKPFTIQLLYETDDVVQPLYLGIDPGRTNIGVAVVKIDGTAVFTAHLETRNKEIPKLMQGRKKARRARRTNGRRCRRQRRAKANGTISKKCVKQTTAQNGSVSKRAKKIGVIKRHLPGCEKEVLCIGIKNKEAKFSNRARPEGWLTPTANQLLQTHINLVKKIQKFLPISDVVLEINKFAFMRLDNPNVQKWQYQQGPLYQKASLEEAVSEMQEHHCLFCKNTIDHYHHVVPQHKNGSNTIGNIVGLCAKHHDLVHKDTSWQEKLAKKKTGLNKRYGALSVLNQIIPALTKELSSLFPKHFFATNGKSTYDYRAAHGVSKDHWLDAYCIAGSVLPNDACDNNINSHVPYELKQFRRHDRRALHKENMSRVYTLNGKSVATNRHKAIKQTTDSLEEFRQRQPNDVCKLKVKEHHPEYRNPKRNFPGCVFLVGKHTHVMQGTSGSHNGKADGYYDTNGNSYSSGKCKFVAKNKGIVFA

SEQ ID NO: 21605 - protein, 463 aa, unidentified
MAVFVLDRSGRPLMPCTEKRARLLLERGRACVHLVMPFTIRIVDLKAENCAFQALRVKLDPGSKATGIALVRETEGKGVAVVNLFELVHRGRQISEALTARRGHRRLRRSKLRYRPPRFDNRGNQKKGWLPPSLQHRVDTSMAWVSRIQRLAPVSAISTELVRFDMQAMENPEIEGAQYQQGTLAGYEVREYLLEKWDRTCAYCGAKDVPLQIEHIHPKSKNGSDRINNLTLACQCCNQKKAALPVEMFLAKKPELLKRILAQAKRPLKDAAAVNSTRWALVNALKATGLPVETASGGQTKFNRSQLGIPKTHALDAACVGEVGSITDWQKPTLSIKAMGRGSYQRTRLDKFGCVRGYLTRSKSIKGFQTGDMVKAEVTTGKKIGSYTGRVAVRATGSFNIQTSAGLVQGVSHRYCTVVQRGNGYGYSLVAKTDVRGTPPQHRDASHPALYLPGLKAEVSRAN

SEQ ID NO: 21606 - protein, 406 aa, unidentified; identical to SEQ ID NO: 10294

SEQ ID NO: 21607 - protein, 447 aa, unidentified
VPAYRIKHITKKEAPYMVYVLDIDGQPLMPTSRHRKVRKLLNSHLAKVVKRCPFTIQLLYQSTKETQPVSLGVDAGSRHIGLAATTEQKVVYQEELVPRNDVVKLLSARRALRSSRRSRKTRYRKPRFNNRVHSKHKGWLAPSVEVKIQEHITAIKRICQILPISDIHVETAEFDLQRLKAMEEGRPLPVGTDYQLGEQYDFYNTRQYVLHRDEYTCQCCGTHDNNVKLHVHHIESCQTRGDAPNNLITLCEHCHKLLHAGKTILPKGKKRGKSYRDATFMGIMRKTLLERLKKEIDVPVEGTYGYITKYWRERAGLEKSHINDAICISKHPYARPLETYYLTKAVRHHNRQIHKTKLSKGGIRKRNQAPYLVKGFRLFDKVLYQGESYFIFGRRITGYFDIRTLDGTKVNKGSTSYKKLRIQDTAEAYLTEVRAIPHMNEFTCVLA

SEQ ID NO: 21608 - protein, 443 aa, Ktedonobacter sp.; identical to SEQ ID NO: 5715

SEQ ID NO: 21609 - protein, 398 aa, unidentified
RRAKANGTISKKCVKQTTAQNGSVSKRAKDIGVIKRRLPGCEKDVLCIGIKNKEAKFNNRTRPEGWLTPTANQLLQTHINLVKKIQKFLPISDVVLEINKFAFMRLDNPNIQKWQYQQGPLYQKANLEEAVSEMQEHHCLFCKKPIEHYHHVVPQHKNGSNTIDNIVGLCTKHHDLVHKETAWQEKLAKKKTGLNKKYGALSVLNQIIPALTKELSSLFPKHFFATNGKSTYDYRAAHGVSKDHWLDAYCIACSVLPSNVCDSNINNHMPYELKQFRRHDRRVLNNENMNRVYTLNNKAVAINRHKAKDQKTVSLEEFRKEHPDDVCKLKVKEHHPTYRNMNRNFPGSVFLVGKQIHIMQGIASSKDGKATKYNDTSATAIAAGKCKFVAKNTGILFV

SEQ ID NO: 21610 - protein, 493 aa, unidentified; identical to SEQ ID NO: 3781

SEQ ID NO: 21611 - protein, 515 aa, unidentified; identical to SEQ ID NO: 4456

SEQ ID NO: 21612 - protein, 424 aa, unidentified; identical to SEQ ID NO: 11884

SEQ ID NO: 21613 - protein, 475 aa, unidentified
MVAVVTSTGKPLMPTSAYRARKLLKKGRAVIFKYRPYFTIQLVDRADGEVQEVEYKSDTGSVHVGISVCTEKKELLSEQRDLLENEPEHHNDRKKNRRTRRNRKRYRKPRFDNRKKKPQEGHEKWLPPTLLHKMEVQVRLFREFCRVVPVTSACFEMGKFDTQALKAVSKGEPVPEGEGYQKGERYGTDTLRAAVFLRDGHTCRFCGRSVKDGAILHVHHVGYWKGDRTNRPANLASACEQCHTPANHGKNGILYGKEPEFKTLKDASYMTSVRWIMLDEIKKAAPGVQVSVTYGVTTKRKRQELHLPKSHVNDAFSMASFHPKKRSDTEYRKKIPRHDRVLQKFYDAIYLDTRDGSEKKGSELSNGRISRNHKKDSENLHQYRGHKVSKGHNSIRRGASSLKPGSIVMYKGEKMTVHGTHTRYVKGKDGKTAKKVNVQFTCPASDGKKSASLEKCTPVSRVYNTGWKRYWPDKK

SEQ ID NO: 21614 - protein, 456 aa, unidentified; identical to SEQ ID NO: 10472

SEQ ID NO: 21615 - protein, 515 aa, unidentified
MTFNKRRHLMPQIYVLGMDGKPQMPTTRRRHVQKLLDTGKARIAEHVPLTIQLLYDNDPVLQPVTLAEDPGRTNIGLAILDLKGNLLLSAVVETRNKEIAKLMEKRRQCRRASRNGERKARQRLAKKYGTMIKAGMMMRKLPQYAAEKFITCKIIRNTESRFCNRKRKDGWLTPSARHLVQTHVNLVHKIQKYLPVTDVALEVNRFAFMLLEDPSVCGVDFQNGPLKGYDDRDAVVYDLQDGKCLMCKNEITQYHHIVPRSRNGSNTINNIAGLCDKCHDRVHKDADFAKQLKDKKAGLDKKYGALSVLNQAIPFICQKLEAEFGKEHVHYCTGRETSLVRRSIGYHKTKKNQVHEVDAWCIGALSLKQIPEDVPDFKDVHLIKQFRRRDRSLIKAQTERVYKLDGKTVAKNRKKRTGQETDSLEDWYNRQVETYGKQAADRMRSQLKATESRRRYNNPDRMMPGAVFLYQGVRYVMRGQHCKGAYLQAVGMGNKDFSAKECKIVTQNTGLVFVS

SEQ ID NO: 21616 - protein, 442 aa, unidentified; identical to SEQ ID NO: 4418

SEQ ID NO: 21617 - protein, 430 aa, unidentified; identical to SEQ ID NO: 8619

SEQ ID NO: 21618 - protein, 394 aa, unidentified
MDAVAVISASGKPLMPTNPVRARKLIKKGKAVIYKYRPLFTIRLTERTDGDIQTIEYCCDTGYQHIGLSIKSRKHEYVNERRDLLPNETERHNDSRKYRKARRRRKLRHRACRRDNRHDNQICKDGYAPSIRNKRDQHISLYRSYTEILPVERAVFEMGQFDTQVLKAIEKGEPLPQGKDYQHGERYGYATLREAVFARDDYTCICCGKNSFKDKRILCVHHLGFRIGDRTNRLANLATVCTKCHTPKNHQPKGKLYNLKPELKDFKGATFMTMVRWDMLDKLKVVSKDIQVDVTYGAATKEARRDLKIKKSHANDAYCMGSFHPSHRTDLKRYEKCRRNNRVLSKFYDATYIDIRDGKKKKANALGCNRTKRRESRRSEKNERIYRGEKVSKG

SEQ ID NO: 21619 - protein, 554 aa, unidentified
MIEQSSDIPFAVRVTPSPTLRLGMPMLWKLNRSRQNRISTGPELAVTGLQQKRRTMRYVYVLDMNGEPLMPTCRYGKVRRMLKSGQAKAVDTLPFTIQLLKPTKTRILQPVIAGQDPGRTNIGMAAVRSDGTELYRAHIETRNKEIVSLMNDRRSFRQASRRGERLARKRLAKKLHTTAKHLNGRILPGCKEPLAVKDIINTESRFNNRLRPEGWLTPTATQLLRTHLEAFRKLSGILPVTEMVLEVNRFAFMQLDNPDMEKRDIDFCRGPLHGTGGVKAAVSLQQDELCLLCREREIEHYHHIVPRSKRGSNTINNIAGLCEKCHERVHKDQAAAEKLQSRKDGLSKKYGGTSVLNQIIPSLTEELGIRYPGHTHVTNGWNTKEFREKHELEKNHDIDAYCIAASILKDVQPVMQTEPYEIKQFRRHNRARIHHQTERTYRYDGKIIAKNRKKRMDQKTDSLEDWVADMTKQYGQGTANRMLSKVTVQKSTRHYNAKGRMMPGTVFTYQKKRFVMTGQLTGGAYYRAYGQDKKNFPAKVVRVVQKNKGLVYVA

SEQ ID NO: 21620 - protein, 428 aa, unidentified
LKVFVLNMRGQPLMPCSPAKARHLLMDKKAVVKRRTPFTLQLTIATGETKQDVTLGVDAGAKHIGLSASTEKEEVFASEVELRQDITGLLAARLAFRRARRHRKTRYRAPRFLNRVHSKHRGWLAPSVENRIQAHMSRIDAICGLLPVTKIVIETASFDIQKIKNPDVEGTDYQQGDQLGFWNVREYVLFRDGHVCQHCRGRSKDKVLNVHHLESRQTGGDAPNNLITLCETCHKAYHAGKIKLKVKRGQSFRAEAFMGIMRWTMLDRVRKAHPDLPVENTYGYLTKNTRITLGLPKTHCIDAYCIAGNLNARRRGVYLYQRQMRKHNRQIHKCKVLSKTLKDGTKVGYRKLNQTPYLVKNFRLFDKVRCFGQTAFIFGRRTSGHFDVRTLNRTRLSDCVNSKKLTLLEKRRTFLTELRKEDGASSPV

SEQ ID NO: 21621 - protein, 349 aa, Halomonas sp.
MAVFVLDKKKQPLMPCSEKRARLLLARGRAVVHKRYPFTIRLKNRVGGEAQPLRLGIDPGSKTTGLALMRETEGELRHVLCLFELIHRGYQIKKALQQRAAFRRRRRSANLRYRAPRFNNRIKPKGWLAPSLQHRVDTVMAWVNRLSKSAPITGISQELVRFDTQKLENPEISGVEYQQGTLLGYEVREYLLEKWGRECAYCGTADTPLEIEHVVPRSRGGSNRVSNLTLSCHPCNAEKDSQTLTDFFATNKGLKKRLKANGLSADAQLERVQRQLKQPMRDASAVNATRWALFSALKTTDLPVAVSSGGHTKYNRQRLNIPKTHALDAACVGAFEKLHDWTVPTLTIK

SEQ ID NO: 21622 - protein, 417 aa, unidentified; identical to SEQ ID NO: 17744

SEQ ID NO: 21623 - protein, 435 aa, Fervidicola sp.; identical to SEQ ID NO: 19783

SEQ ID NO: 21624 - protein, 424 aa, unidentified; identical to SEQ ID NO: 14068

SEQ ID NO: 21625 - protein, 443 aa, unidentified
LTKDENRPSGRTTGLRAEQAEPAGIRKGDTLKVFVLNMRGKPLMPCSPAKARHMLKAGKAFVVRRTPFTIKLTIATGETKQDVTLGVDAGARHVGISATTEKEEVFASEVALRQDITGLLADRLAFRRARRNRKTRYRAPRFNNRVRSKHKGWLAPSVENRIQAHMSRIDAVCRLLPVTKIVIEAASFDVQKIKNPTIEGTDYQQGDQLGFWNVREYVLFRDGHICQHCRGRSKDPILNVHHLESRKTGGDAPNNLITLCETCHKAYHAGKIKLKVKRGQSFRAEAFMGIMRWTLLDRVRKTHPKLPVENTYGYLTKHKRIALGLPKTHCADAFCIAGNLKALRRGDFLFQQQTRKHNRQIHKCSILKGGVRKLNQAPFLVKGFRLFDKVRIGGQIGFVFGRRVRGTFNIRRLDKTVIGTDINCKKLSLLETRKTFLTELRKE

SEQ ID NO: 21626 - protein, 421 aa, unidentified; identical to SEQ ID NO: 2738

SEQ ID NO: 21627 - protein, 431 aa, unidentified; identical to SEQ ID NO: 6230

SEQ ID NO: 21628 - protein, 476 aa, unidentified
LEVVDTEGVSHPGLPGKYKHKGGQLMSVAVISKTGERLMPTSEYRVRKLLKSGKAIIHSYHPFTIQLTERETGDIQPIELCMDTGYIHVGISVKSEKHEYLAEQIDTLTDERGRHDACRMYRRQRRSRKRYRQARFNNRKRDQGWIAPSLEHKKKIHIQAISRINNVMPITDITLEMGNFDTQVLKAKEEGKPLPQGADYQHGERYGITTLREAVFARDGYTCQCCGRAIKDGVILHVHHIVYRSHGGTNRMSNLITVCDKCHTPANHKQGGKLYNWKPKIASFKGATYMTTIRWKLYNEVKTLFPDIDIHITYGAETKERRRAFDIDKSHVNDAFVMGQFHPKHRSKPICYKKKRRNNRCLEKFYDAKYIDSRDGKKRSGQELFNGRISRNHKKDSENLHQYRLQKVTPGRRAIRRQHYPIQPHDIIIYNGNKIEVSGCQHKGTRVVFSKTKKSVQISKIKLFKYAGGYSKSVFN

SEQ ID NO: 21629 - protein, 451 aa, unidentified
MSVAVISKTGERLMPTSEYRARKLLKSGKAIKYSYHPFTIQLTERKTGNIQPIELCMDTGYIHIGISVKSEKHEYLTEQIDTLTDERSRHNARRMYRSQRRNRKRYRQPRFNNRKKDKGWIAPSLEHKKNIHVQAISRISRVMPVTDITMEMGNFDTQVLKAKEEGRPLPQGVDYQHGERYSIATLREAVFARDGYKCQCCGRTIKDGAILHIHHIKYRSQGGTNSISNLATVCDKCHTPKNHKPGGKLYGWKPKLPSFKGATFMTTIRWQLYNEAKALFPDIDIHITYGAATKERRRELNIDKSHINDAFVMGQFHPRHRIKAVLYKKKRRNNRCLEKFYDAKYIDSRDGKKRSGQELFNGRINRNHKKDSENLHQYRLQKVTAGKRTVRKQHYSVQPHDIIIYESRKRETTGCHCNGARVMLLPDKKSVSIKKIKIYRYAGGYFKSTFN

SEQ ID NO: 21630 - protein, 471 aa, unidentified
  REGION 1..471: note = IscB polypeptide
MQQLRQRNTYTPTNTSLVCSNCDSELNKDVNLSVQNSKTCLNISEENQRQHTDGSDLRVLNIVYVLNQRGKPLMPTKSSKARKLLKQGNARVVRNTPFTIQLLYATGESKQAITLGVDTGYQYIGLSAVTKKQELFAAIIKLRTDIVKLLLARRSYRRNRRQRKTWYRQSRFLNRKKNKGWLAPSIQHRLDSHLRIINFVKRLLPISEIVIEVAAFDIQKIKNPSIEGKDYQNGEQKDFWNVREYVLYRDKHTCQYCHVKDTILEVHHIISRSTGGSNSPDNLITLCIKCHQKITQNKLKLTIRLSDAFKTETFMSIIRWKIVDRLRKLGNVVRCTYGYVTKSKLINLHLAKSHINDAFVIAEGNLLKERCVSYIVIQKRRNNRKLQQCRKGYKPAIRRCRYSIQPKDIVVINKQLYISMGTSNFGQQITVRDTTGERNYSVKKIEKHYYINGWLFLSICKYKELGYAVVH

SEQ ID NO: 21631 - protein, 349 aa, unidentified
MPRNDVVENLSTRREFRHARRNRTTRYRKPRFNNRVHSKNNGWLAPSVEVKIQEHITSIKRVCAILPISKIVVETAEFDLQLLKAVQDGKPVPEGEDYQKGEMYGSYDVRQYVLWRDNYTCTCCGVKGTDKKPVKLHVHHFESRKHGGNAPDNYGTLCEDCHKKLHLGIITDISLKTRKRPSTRDAAFMGIMRKTLMQRLITGLSIPVAETKGYITKAAREEILKLPKTHTNDALAIAQGRHGFGIREQAYVKPTNRIYTVRPVRHHNRQLHKATMLKGGIRKLNQASKYIFGFRLYDKVLYQGGECFVWGRRRSGSFLLRTIDGTKVKDGVGYRNLTLLERSTNYLIA

SEQ ID NO: 21632 - protein, 419 aa, Moorena sp.; identical to SEQ ID NO: 2999

SEQ ID NO: 21633 - protein, 278 aa, unidentified
VVVETAEFDLQLLKAIADGKPVPQGEDYQKGEMYGHYNVRQYVLWRDNYTCQCCGTHPSKKKEVRLHVHHLESRKVGGDAPDNQVTLCESCHEKLHKGLIAEKDFKKRKRRSTRDATFMGIMRKTLMQRLCSELPIPVVKTRGYITKATREKLLVLPKSHTNDALAIAQGKQGFNVGYLPGIVQINKIYTIRPVRHHNRQLHKAAILTGGIRKSNQAGKYVFGYCLFDKVQFNGQDCFIWGRTTGIFTIKTINGKMIKDGISFKKLKLVEKSTSYLIA

SEQ ID NO: 21634 - protein, 453 aa, Solobacterium sp.; identical to SEQ ID NO: 6443
  source 1..453: note = isolate UBA2881

SEQ ID NO: 21635 - protein, 527 aa, Actinomadura sp.; identical to SEQ ID NO: 17242

SEQ ID NO: 21636 - protein, 268 aa, unidentified
LLKAVAEGKPVPQGEDYQKGEMYGHYNVRQYVLWRDSYTCCICGVHGSVRKGVPLHVHHLESRRVGGDAPDNLVTLCTACHDKLHKGIIMAADIKKRKRRSTRDATFMGIMRMTLLRRLREQLPVPVVETRGYITKATRENLLVLPKSHTNDALAIAHGPQGFRAEYLPNIRQADRLYTIRPVRHHNRQLHKATILKGGVRKANQAEKYICGFRLYDKVLYNGIECFVWGRRTSGSFLLRQLNGEKVKDGVSYKHLKLLERSQSYLVA

SEQ ID NO: 21637 - protein, 512 aa, unidentified; identical to SEQ ID NO: 7636

SEQ ID NO: 21638 - protein, 431 aa, unidentified
MDAWDIIVILNKRGKPLMPCSPAKARLLLKEKKAIVVRRTPFTIQLTIATGESKQPVSLGVDAGYKHVGLSASTEKAELYASEVELRKDITDLLSARRALRQSRRNRKTRYRAPRFDNRIRTKRKGWLAPSVENRINAHLSRIKAVLRLLPITKITVETASFDMQRLKNPDISGKEYQEGEQLGFWNVREYVLFRDGHVCRHCHGRSKDPVLNVHHLESRRTGSDSPDNLITLCVTCHKALHRGEITLKAKRGQSFRAQAFMGIMRREVLNRLKASYPELKVHETYGYLTKHARIANGIVKSHGADAFCIAGNLGAERLGEFFFQKQTRRNNRQIHKLSILKGGIRKRNQAPFEAKGFRLFDKVACQGEEGFIFGRRSSGSFDVRKLDGTRISAGISCKKLRLLEKRRTYLTEIRKEEALPPLPEGRGLRA

SEQ ID NO: 21639 - protein, 406 aa, unidentified
MVYVQDIYGRPLMPTTRHGKVRRLLKSKKATVVNLCPFTIRLLYDTTGYKQEITLGVDTGTKHVGLSATTKSKELYASEVILRSDVVDLLSTRRELRKIRRYRLRYRKPRFMNRIKSKKRGWIAPSIRQKIDSHIRIIGFVYSILPVSKLIIEVAQFDTQKIKNPEISGKEYQEGEQLGFWNVREYVLARDEHKCQHCKGKSKDPVLNVHHIESRKTGGDSPSNLITLCKTCHKEFHKGNIKLKVNRGESLRDAAVMSIMKWELYDELKSLYPNVKMTFGYITKYNRINHGIEKSHVSDAFVISRNFDSERLGYYYKRKLVLRHNRQIHKMKAPKGGNKRMNQSPFKVFGFRLFDKVMFQGKERFIYARRLRGIFNIRDINGENKKDISYKKLEYVSHGLISIVAG

SEQ ID NO: 21640 - protein, 442 aa, unidentified
MSTTVFVLDKKHRPLMPCRPARARRLLRAGRARVVKRFPFVIRLVDRTVEQSEVQPVLIKLDPGSRETGAAVVRDDEKKRHHALAFFVIKHRGGAIRDALKARSAFRRRRRSQNLRCRSPRFLNRVKPKGWLPPSLRHRVETTLSFVRRMCRYLPVSGIATELVKFDSQKLQNPEVSGVKYQQGTLFEYEVREYLLEKFGRKCVYCGAEGVPLNIDHVVPRAKGGSNRVSNLVLACVSCNQKKGARSLEDFLKGKPEVLARVRRELKTPLRDAAAVNATRWVLFNELKATGLPVETGSGALTKLNRHAFGVEKEHWLDALCVGRLNGAVTRKGLNVLEIRCMGRGSRQRTRLTKYGFPRGYLMRQKCVHGFATGDMVEANVPKGKKAGLWRGRVAVRVSGSFNIQTPKGVIQGVGWKHCRLISHNDGYGYAWLGHAPHSSPA

SEQ ID NO: 21641 - protein, 413 aa, unidentified; identical to SEQ ID NO: 3295

SEQ ID NO: 21642 - protein, 436 aa, unidentified
MTKTLTTRTIQACVLDQQGKPLMPTTRLGKVYRLLKTQKAHIVSYEPFTIQLDYEPDTQVIQPMTLGVDSGALHSGYSVANEHREYYSAEVIARNDISNRLSDRRMYRQNRRSRKTRYRKPRFNNRKNKKKGWLPPSLEQKVATQVNEIDHIHRYFPIETIIVETAEFDIQKIKNPDITGVEYQQGTLQGYNIRNYLLEKHGRKCFYCGKAVSDFEVEHMFPKSKGGSNRIDNLTLSCHDCNEKKGTLTAEEFIQQTLPAKKAVAKLKQLPNEKRLFKYMAYMNATRWTLYDAIKERYPNVKMTYGYITKYERIQAGLPKTHHIDAKCITGFATVPSMSQTVVKVKMRRHNRQLHRATFSKGHIRKVACLPTVTFGFQLYDLVLFDNHRYYIKSRRSSGAFALVSVEGLKDENRNYKKLTLLAHTNAYLTNRYVNA

SEQ ID NO: 21643 - protein, 477 aa, Blautia sp.; identical to SEQ ID NO: 2707

SEQ ID NO: 21644 - protein, 557 aa, unidentified; identical to SEQ ID NO: 14359

SEQ ID NO: 21645 - protein, 421 aa, unidentified
MRGQPLMPCSPTKARHLLRDKKAVVNRRTPFTIQLTIATGETKQDVTLGVDAGAKHIGLSASTEKEEVFASEVELRQDITKLLSARLAFRRSRRHRKTRYRAPRFLNRVHSKHKGWLAPSVENRIQAHMSRIDAICGLLPVTKIVIETASFDIQKIKDPSVEGTDYQQGDQLGFWNVREYVLFRDGHVCQHCHGRSKDKILNVHHLESRQTGGDAPNNLITLCETCHKAYHAGKIKLKVKRGQSFRAEAFMGIMRWTLLDRVRKAHPGLPVENTYGYLTKHTRITHGLPKTHCVDAYCIAGNLKAVRRGVYLHQRQMRKHNRQIHKFTVLSKRLEDGTKIGYRKLNQSPYLVHGFRLFDKVRCLGQIGFIFGRRSSGYFDVRRLDGVKLSPSISWRKLTLLEKRSTYLTELRKQDGASSPV

SEQ ID NO: 21646 - protein, 435 aa, Desulfobacterium sp.; identical to SEQ ID NO: 10303

SEQ ID NO: 21647 - protein, 408 aa, Halomonas sp.
MAIFVLDKKKQPLMPCSEKRARLLLQRGRAVVHKRYPFTIRLKDRVGGSTQPLSLGIDPGSKTTGLALIREPDSQQRHVLCLFELIHRGYQIKKALQQRAAFRRRRRSANLRYRAPRFNNRTKPKGWLAPSLQHRVDTVTAWVNRLNRLAPVTAISQELVRFDTQKLDNPEINGVEYQQGTLLGYEVREYLLEKWGRECAYCGTADTPLEIEHVIPRSRGGSNRVSNLTLSCHPCNQSKDALSLVDFFATDKGLKKRLKANGHTANARLERVQRQLKQPLRDASAINATRWALFNALKATSLPVAVGTGGRTKYNRQRLGIPKTHALDAACVGAFDALHAWQVPTLTIKAMGRGSYQRTRTRVSAWLSDAAEAGARLSNRRHGACDGTDWQESRYPYGACRGTQNRQF

SEQ ID NO: 21648 - protein, 512 aa, unidentified; identical to SEQ ID NO: 12632

SEQ ID NO: 21649 - protein, 440 aa, unidentified
TVQQSTHHLPFGRVFIRRNLFMVYVISQDGKPLMPCSDPIARLLLKQGKAKVKKREPFTIKLTYETTNHTQGLTLGVDTGSGTIGTAVSKDNGDIVYMSEVVVRNDITDKMTQRAKYRRNRRNRKTRYRKARWLNRASSIKKDRFSPTMQSKLHSHVREIEYIQSILPVTEMVFETGQFDMQLMKNPSLANPKVRPWGYQKGANYGFENTKAMVLNRDNYTCQCCKGKHKDSKLEVHHIVFRSQGGSDEESNLLTLCHTCHKDLHSGKINPKLSGKLKGNLKYATQMNSIRKQLFRFYPNAIETFGYVTKANRLHLGVDKEHYYDACTIATQGNAFNVKSNLYKKKCVSDGDFQKTKGIRSEQPIVTDKICGFRKFDKVRYFGNDYFIKGRMSTGYAILMDIDGNKIDFSTMPRGYKTPKLSNCKRITARSTVMTQVKVV

SEQ ID NO: 21650 - protein, 439 aa, unidentified
MKVCVVNQHGRPLMPTTPRKARLLLKAGKARIVSRTPFTIQLLYGTRGYTQPITLGVDAGYATVGFSAVTDKEELAGGDLKLLVGISDRLNERAMYRGGRRSRTRYRKPRFDNRRRAEGWLAPSIQHKLDSHLRLMDRLCAVLPITHIVIEVASFDIQRLKDPDIAGEGYQQGEQTGFWNLREYILHRDAHTCQNPQCPNRTKEKVLQVHHLGYWCGDDSDRPANLITLCTRCHTPENHQPGGFLWGWQPHLNSFRPETFMSMVRWRLVEAVGAEATYGYLTKSRRIELGLSKSHAHDAFVIAGGSAQPRADPLLLEQVRRNRRALQTFYDAKYIDTRTGEVVKAQALNNGRRTRNRNLNSENLRRYRGPKVAKGRVSIRRRRYPYQPGDLVSYEGHIYRVQGMGGYGRNLKLAGRPKEVKASLVAPVCWRKGICQQVS

SEQ ID NO: 21651 - protein, 477 aa, Ferroplasma sp.; identical to SEQ ID NO: 11016

SEQ ID NO: 21652 - protein, 442 aa, Virgibacillus sp.; identical to SEQ ID NO: 6559

SEQ ID NO: 21653 - protein, 248 aa, unidentified
MVAVVDMSGRPLMPTNEYRARKLLKQKKAKIFGYRPFTIQLTERKSTEIQPIELCMDTGYIHIGISAKSERHEYLGMQIDTLTDEKLKRDDKRQYRRQRRNRKRYRAPRFDNRRRKEGWIAPSLEHKKEIHIDAIQRICKVMPITDITLEMGNFDTHVLKAVEEGKPLPQGSDYQHGERYGIATLREAVFLRDGYKCQCCEKSVKDGAILHVHHIKYRSQGGTNRMSNLITVCDKCHTPKNHKPGGKL

SEQ ID NO: 21654 - protein, 404 aa, unidentified; identical to SEQ ID NO: 18375
  source 1..404: note = Clostridiaceae bacterium UBA2240

SEQ ID NO: 21655 - protein, 465 aa, unidentified; identical to SEQ ID NO: 3856

SEQ ID NO: 21656 - protein, 440 aa, unidentified
VPPATNPFQHWRRILTGRKTEVTNLRVFVLNKRGKPLMPCSPAKARILLKEQKAVVTRRMPFTIRLTIATGETKQPVTLGVDAGYKHVGLSACTEKAELYASEVELRQDITELLSARLALRRARRNRQTRYRAPRFDNRVGSKHKGWLAPSVENRINAHLSRIDAVLRILPISKIVIETAAFDTQLLKDTNIEGATYQQGEQFGFWNVREYVLFRDGHVCQHCHGKSKDPVLNVHHLESRRTGGDAPNNLITLCETCHKALHQGKLTLKVKRGFTYKAETFMGIMRWTVQDRLKTAYPDIEIRNTYGYLTKHSRISHGIAKSHCADAYCIAGHLKAKRLAGYYFQKQTRRHNRQIHKLTILKGGLRKRNQAAYEIKGFRLFDKVKVLGEEGFIFGRRASGYFDVRKLDGTRISAGISSKKLTLLEKRKTYLTEYRKEAAL

SEQ ID NO: 21657 - protein, 420 aa, unidentified
MSVAVMSKTGMQLMPTSEYRARKLLKSKKATVYGHNPFTIQLTERETGDVQPVELCMDTGYLHIGTSVKSEKHEYLGVQIDTLTDEKQKHDACRMYRRQRRGRKRYRQSRFNNRKRSDGWIAPSLEHKKDIHIQTISRICNAMPITNITLEMGNFDTQVLKALEKNRPLPQGTDYQHGERYGIATLREAVFARDKYTCQCCRRTIADSAILHVHHIIYRSRGGTNRMSNLATVCDRCHTPANHKPGGRLYNWKPKIASFKGATFMTAVRWKMYNEVKSKFSNIKIHITYGAKTKEQRRAFDITKSHVNDAFVMGQFHPKHRSRPICYKKKRRNNRCLEKFYDAKYIDSRDGKKRSGQELFNGRIDRNHKKDSENLHQYRQQKVSAGRRTIRKQHHSIQPHDIVVFNRQQSVQSATERQEL

SEQ ID NO: 21658 - protein, 279 aa, unidentified
VVVETAEFDLQLLKAIADGKPVPQGEDYQKGEMYGHYNVRQYVLWRDNYTCQCCGTHPSKKKEVRLHVHHLESRKVGGDAPDNQVTLCESCHEKLHKGLIAEKDFKKRKRRSTRDATFMGIMRKTLMQRLCSELPIPVVKTRGYITKATREKLLVLPKSHTNDALAIAQGKRGFNVGYLPEIAQIDKIYTIRPVRHHNRQLHKATILKGGIRKSNQTEKYVFGYCLFDKVQFNGQDCFIWGRRTTGIFTIKTINGKMIKDGISFKKLKPVEKSTGYLIA

SEQ ID NO: 21659 - protein, 351 aa, unidentified
HVGISATTEKEEVFASEVALRQDITGLLADRLAFRRARRNRKTRYRAPRFNNRVRSKHKGWLAPSVENRIQAHMSRIDAVCRLLPVTKIVIEAASFDVQKIKNPTIEGTGYQQGDQLGFWNVREYVLFRDGHVCQHCHGRSRDKILNVHHLESRKTGGDAPNNLITLCETCHKAYHAGKIKLKVKRGQSFRAEAFMGIMRWTLLDRVRKTHPKLPVENTYGYLTKHKRIALGLPKTHCADAFCIAGNLKALRRGDFLFQQQTRKHNRQIHRCSILKGGVRKLNQAPFLVKGFRLFDKVRIGGQIGFVFGRRVRGIFNIRRLDKTVIGKDINCKKLSLLETRKTFLTELRKE

SEQ ID NO: 21660 - protein, 338 aa, unidentified
LRHKKELNVNVVKMYCAVMPITHATVEVGSFDTMLVKAIQEGKAIPEGADYQKGPRYNLATLREAVFYRDNYTCQVCGRKIADGAILHMHHMFYWKGRHGNSLDELLTVCEKCHTPANHQKSGKLYGFGENVKFADLSGAAFMNTVRWQIVNELYATFGKDFVTVTYGAMTKEKRIALHLEKSHNNDAYAMGEFHPNCRCTFEHYEKVRRNNRILEKFYDSRYIDIRTGEIATGKELFNGRINRNHKKDSENLHRYRGKRTYAGHRALRRKKVALNPGDLVSLNGEVLIVYGTHTDKKGAVNVEFKTPAKNGRKSASLKKLKIVKATSSIHPAWEKVS

SEQ ID NO: 21661 - protein, 451 aa, unidentified
MQTLQLKFKNVPTGTSLACSSTTLPLNRDERTSVAEKVLDCNNPEVNQRARTPGLKGIVFVLSIDGSPLMPCTYAKARHLLEGGKAKVVKLNPFVIRLKFECENKVQKMRLGVDAGYKTVGFSAIIDKREVFAGDFNLDQNTSKRLIEKKMYRRKKRGRLRYREPRFDNRKISAGWLPPSTQRKFDAHVTLVNTLKKLLPIEKIITEIGNFDIQKLMNPEVSGKGYQQGDLFGYNNLKAFLMEREHGKCQLCGKGFIKGNGSHTHTHHVILRSQGGTDRPNNMALLHKKCHDKLHEERLFDNLKRARQYKAETFMSIVGGMFQGILGCEIIYGYETKTKRDMLGLEKSHVNDAFVIAGGTTQERCTSGVIEQKRRNNRTLQTNRKGFIPSIRKKRYPIQSRDFIWIGRKKYLCGGTACRGYQVYYFDGLEKKLIPVKKVNRIYSTGGLVWR

SEQ ID NO: 21662 - protein, 406 aa, unidentified; identical to SEQ ID NO: 2752

SEQ ID NO: 21663 - protein, 418 aa, Beggiatoa sp.
MQSVFVLDLEKNPLMPCHPARARKLLRKGRAAVYKRYPFTIILKDRVGGELQPVELKFDPGSKTTGIAVVGQFELGQEVVFGANLEHRGQQIKQDLKSRRANRSARRNRKTRYRPARFNNRCRTLGWLPPSLMSRVFNVETWTKRLQKLVPITSIAVETVRFDTQKMQNPEISGIEYQQGVLAGYEVREYLLEKCAYCGKTNVPLEIEHIQPKSKGGSDRISNLTIACVPCNQKKGNRPVEDFLKRKPKILKKVKAQTKKSLKDTAAVNATRYAIGNVLKKTKLPVTFWSGARTKFNRTSQNYPKYHWIDAACVGETGASVCIPDTLKPLTIVAMGHGTRQMCRVDKYGFPRTSAKKQKVIKGFQTGDLVKAVVTSGKKIGTYFGRIAVRTTGYFNITTKNGETTQGISWKCCQMLQP

SEQ ID NO: 21664 - protein, 460 aa, unidentified; identical to SEQ ID NO: 15791

SEQ ID NO: 21665 - protein, 426 aa, unidentified; identical to SEQ ID NO: 20622

SEQ ID NO: 21666 - protein, 372 aa, Moorena sp.
CQVKIDPGSKVTGFALVQKDQVIWAMELEHRGGLIKKKLESRRAVRRGRRNRNTRYRKPRFLNRKRPEGWLPPSLEHRILTTQTWVKRLIKFCPVSEIWVERVKFDTQKMQSPEISGVEYQQGELAGYEVREYLLEKWGRECAYCGKKNVPLEIEHIHPKSKGGSNRVSNLCLACEKCNQRKGNKPVEDFLKKKPKLLQKIKAKAKQPLKDAAAVNATRNRLVKVLQGIKPVITGTGAQTKYNRTKLGFPKQHWVDAACVGNIETLTLKISQPLLVTCKGQGGRQKAALNKCGYPIRHNPLKPIGRRPRCANKGWVTGDLVRHQRLGIGKVTPRSKGSFGFTPLGMKGYKSCKPQDISAIHRKDGYIYSFCG

SEQ ID NO: 21667 - protein, 415 aa, unidentified; identical to SEQ ID NO: 3018

SEQ ID NO: 21668 - protein, 406 aa, unidentified; identical to SEQ ID NO: 16062

SEQ ID NO: 21669 - protein, 475 aa, Blautia sp.; identical to SEQ ID NO: 4128

SEQ ID NO: 21670 - protein, 406 aa, unidentified; identical to SEQ ID NO: 16733

SEQ ID NO: 21671 - protein, 476 aa, unidentified
  source 1..476: note = uncultured beta proteobacterium
MAVFVLDRQSKVLMPCTEKRARLLLACARARVHKLVPFVIRLTDREAKSCAVQPFEVKIDPGSKVTGLAVVRVSALVQNHTGEVKKSAHVLHLIELQHRGRQISEALTARRQMRRRRRANLRYRAPRFLNRGNKKKGWLAPSLQHRVHTTRSWVRRLMRYAPVAHLAQELARFDMQALQAQAEGRDISGVLYQQGTLFGYEMREYLLEKWGRKCGYCDLKDTPLEIDHITARSRGGSDRVSNLTLACHSCNQKKGAQDISVFLAKDAARLKRVLAHAKAPLKDAAAVNATRWSLFNALNATGLPVTVASGGRTKFNRLQLGIPKTHALDAACVGEIANLAAWNKPTLQIKCTGRGCYQRTRINKYGFARGYLMRKKSVKGFQTGDLVKAVVKKGKNAGTHAGRVAVRASGSFNIQTSKGLVQGISHAHCTVMQRADGYGYQQVAKMDSIGTPPMRGTLARSALSLPALKGGVSRAK

SEQ ID NO: 21672 - protein, 306 aa, unidentified
LAPSVEVKIQEHITSIKRVCRILPVSKVVIETAEFDLQLLKAIEESKPVPQGEDYQQGEMYGHYNVRQYVLWRDGYTCQCCGAHATKKKEVRLHVHHLESRKVDGDAPDNQVTLCESCHEKLHKGLIAEKDFKKRKRKSTRDATFMGIMRKTLMQRLCSELPIPVIETRGYITKATREKLLVLPKSHTNDALAIAQGKQGFNVGYLPGIVQINKIYTIRPVRHHNRQLHKATILKGGIRKSNQTEKYVFGYRLFDKVQFNGQDCFIWGRRTTGIFTIKTINGKMIKDGISFKKLKLAEKSTSYLIA

SEQ ID NO: 21673 - protein, 376 aa, unidentified
SVSKRAKDIGVIKRRLPGCEKDVLCIGIKNKETKFTNRTRPEGWLTPTANQLLQTHINLVKKIQKFLPISDVVLEVNKFAFMRLDNPNIQKWQYQQGPLYKKESLESAVSEIQEHHCLFCKKPIDHYHHVVPQHKNGSNTIGNIVGLCAKHHDLVHKDSAWEKKLAQKSTGLNKKYGALGVLNQIIPTLTNELSSLFPKHSFVTNGKSTYDYRAAHGVSKDHWLDAYCIACSVLPSNVCDSNINNHMPYELKQFRRHDRRVLNNENMNRVYTLNNKAVAINRHKAKDQKTVSLEKFRKEHPDDVCKLKVKEHHPTYRNMNRNFPGSVFLVGKQIHVMQGIASSKDGKATKYNDTSATAIATGKCKFVAKNTGILFV

SEQ ID NO: 21674 - protein, 431 aa, unidentified; identical to SEQ ID NO: 5232

SEQ ID NO: 21675 - protein, 418 aa, unidentified; identical to SEQ ID NO: 4327

SEQ ID NO: 21676 - protein, 419 aa, unidentified; identical to SEQ ID NO: 10184

SEQ ID NO: 21677 - protein, 396 aa, unidentified; identical to SEQ ID NO: 4508

SEQ ID NO: 21678 - protein, 247 aa, unidentified
MYGSYNVCQYVLWRDNYTCICCGVRGTPKNPVRLHVHHFESRKYGGNAPDNHGTLCDDCHKKFHLGIITDVKLKTRRRQSTRDAAFMGIMRKTLMWRLRTELFIPVAETKGYITKATREKLLVLPKSHTRDALAIAQGRHGFGIKEYAYVEPANHIYTVRPVRHHNRQLHKASILKGGIRKRNQASKYVFGFRLYDKVLYQGKACFVWGRRTSGTFLLRTIDGIKVKDGVSYRNLTLLERSSNYLIA

SEQ ID NO: 21679 - protein, 431 aa, unidentified
MPNKVYVLDKHGRPLMPCSPAKARHLLDEGKAKIKKRTPFTIQLVYGSSGYTQEVILGVDAGSKTIGVSALTKKEELFAANVIPRNDVVDLLSTRREFRRARRNRKTRYRKPRFDNRVRSKHKGWLAPSVEVKIQEHITAIRRVCGILPVSKVVVETAEFDLQLLKAIADGKPVPQGEDYQKGEMYGHYNVRQYVLWRDDYTCQCCGAHATKKKEVRLHVHHLESRKVGGDAPDNQVTLCESCHEKLHKGLITEKDFKKRKRRSTRDATFMGIMRKTLMQRLCSELPIPVVETRGYITKATREKLLVLPKSHTNDALAIAQGKQGFNVGYLPGILQIDKIYTIRPVRHHNRQLHKAAILKGGIRKSNQAGKYVFGYRLFDKVQFNGQDCFIWGRRTTGIFTIKTINGKMIKDGISFKKLKLAEKSTSYLIA

SEQ ID NO: 21680 - protein, 441 aa, Lactobacillus sp.; identical to SEQ ID NO: 10422

SEQ ID NO: 21681 - protein, 431 aa, unidentified
MPDKVYVISRLGHPLMPCSPAKARHLLDDKKAKVVKRMPFTIRLLYGSTKYIQPIILGVDAGSKTIGLSASTAKEEVFAAEVMPRNDVVENLSTRREFRRARRNRTTRYRKPRSDNRVRSNHERWLAPSVKVKIQEHITSIKRVCTILPISKVVIETAEFDLQLLKAIQEGKPIPEGEDYQKGEMYGSYNVCQYVLWRDNYTCICCGVRGTPKNPVRLHVHHFESCKYGGNAPDNHGTLCDDCHKKFHLGIITDVKLKTRRRQSTRDAAFMGIMRKTLMWRLRTELFIPVAETKGYITKATREKLLVLPKSHTRDALAIAQGRHGFGIKEYAYVEPANHIYTVRPVRHHNRQLHKASILKGGIRKRNQASKYVFGFRLYDKVLYQGKACFVWGRRTSGTFFLRTIDGIKVKDGVSYRNLTLLERSSNYLIA

SEQ ID NO: 21682 - protein, 406 aa, unidentified; identical to SEQ ID NO: 2703

SEQ ID NO: 21683 - protein, 416 aa, Quinella sp.
VYVINQYGKPLMPCSARKARVLLKEGKAIVIRREPFTIRLKFGSSGYKQPITLGVDAGAKHIGLSASTVKRELYSAEVVLRTDITDLLSTRRELRRARRNRKTRYRQPRFLNRVKAKKQGWLAPTIQNRINAHLKVVDNVCKILPVAKIVVETASFDIQKLKNPDISGIEYQQGEQLNFWNVREYVFFRDNHTCQHCHGKSKNNVLNVHHLESRKTGGDAPNNLITLCETCHKAYHAGKIKLKQTRGQSFKAEAFMGIMRWAFFNKLKEIYQTLEVKNTYGYITKNKRIRASLPKEHYIDAFCIAGNMQAERLNYYHYQKQVRKHNRQIHKLTINKGGTRKRNQSPFEIFGYRLFDKVKCKGEVGFIFGRRASGSFDIRKLDGTKISAGISYKKLVLISKRKTYLTERRGAAHPHS

SEQ ID NO: 21684 - protein, 441 aa, unidentified
MCVFVLDRDRHPLDPCHPARARQLLAAGRASVCRRFPFTIILQDRTRAESVVHDHRLKIDPGSKTTGLALLAGARVRWAAELTHRGQRIKDALESRRAVRRHRRQRKTRYRPPRFLNRTRPSRWLPPSLQSRIANVMTWVERLTRLCPITALSQKLVRFDTQLLQHPEIAGVAYQHGALAGYEVREYLLEKWHRTCAYCGVKDVPLEVEHMIPRVRGGSDRVSNLTLACVPCNQKKGRQTAAEFGFPQLQAQAKFPLKDAAAVNATRWALYRALQTTGLPVETGTGGRTKYNRTRLHIPKSHWGDAACVGASTPEALSLAGVQPLLITAMGHGTRQMCRTDAYGFPNRHRARQKRYCGLQTGDIVKAVVPTGKYAGTWISRVVVKARGWFDLVIYGKKASVHQKHCIRLWAADGYTYTLPAVAGSAVSSPRSSEGSPQRKF

SEQ ID NO: 21685 - protein, 308 aa, unidentified
  source 1..308: note = Lachnospiraceae bacterium
MIIALDKYKRPLGFLTERRCRILMERKRAVLYRVFPTVVILMDVDARTSPDLPLFRIKIDPGSKYTGIAIIRNDTDEFVYAMQIEHRGDAVRAALNKRKNARRNRRSRETGYRRAKWGNRCLSEKDKRSYDSSREDGWLPPSIRSAADNVISWVRRLGRWINLTECSFEAVRFDTQLMEDPDIEGEEYQHGTLFGLEIKEYLMEKFGHTCQYCGGKSGDPVLEWEHMRPKSRGGSDRVKNALLSCSSCNKDKGNRTPEEWLELIKARLPREKGKRKELDEERVELIQKVVDGKPQGGALRYAVWVSSS

SEQ ID NO: 21686 - protein, 419 aa, unidentified; identical to SEQ ID NO: 4209

SEQ ID NO: 21687 - protein, 447 aa, unidentified
MVAVLSKTGIRLMPTSSYRARKLLARKKAVIAGYRPFTIRLTERESGEIQPIEYTIDTGYYHIGNSVKTVKHELAAVEVRTLMDEKLRQEDRHRYRRQRRSRLRYRAARFDNRRRREGWLAPSVRHRMEQNLSVLNRIARVVPVSRIVMEMGQFDTQVLKAVASGIPLPQGADYQQGDRYGIATLREAVFTRDNYTCQCCGKKGTDGVILHVHHIRYRSQGGTDAMSNLATVCYKCHTPKNHKPGGILYGWKLKLPSFKGATFMTSVRWMLYHQVKELYPELEIQLTYGAATKEQRRILDVPKSHVNDAYTMGEFHPSHRVRPVIYQKKRRNNRVLEKFYDAKYIDLRDGKKHSGQELFNGRTNRNHNRDTENLHKYRGKKVSKGRRSIRRRRYPFQPHDLVVYRGKSLETAGCHNKGTRLLIGKRSIAVKEVKIRQYCGGYFAVEI

SEQ ID NO: 21688 - protein, 462 aa, unidentified; identical to SEQ ID NO: 2823

SEQ ID NO: 21689 - protein, 445 aa, unidentified; identical to SEQ ID NO: 10136

SEQ ID NO: 21690 - protein, 420 aa, unidentified; identical to SEQ ID NO: 8166

SEQ ID NO: 21691 - protein, 472 aa, unidentified
VVGNNLLSIKPLINIGEGVIYSSICTGLSLQTYQKRKEVPYMVYVLDIDGQLLMPTTRHGKVRRLLNNHLAKVVKRCPFTIQLLYQSTKETQPVSLGVDAGSKHIGMAATTEKKVVYQEELSPRNDVVKLLSARRTLRRTRRNRKTRYRKPRFNNRAHSKHKGWLAPSVEVKIQEHITAIKRICQILPISEIHVETAEFDLQRLKAMDEGSPLPVGIDYQLGEQYDFYNTRQYVLHRDGYTCQCCGTHDNNIKLHVHHIESRQTGGDAPNNLIILCEHCHKALHEGKLELPKGKKRGKSYRDATFMGVMRKTLLERLKKEIDVPVEGTYGYITKYWRERAGLEKSHIHDAVCISKYPYAKPLDIYYLTKTVRHHNRQIHKSNFSKGGIRKRNQAPYLVKGFRLFDKVLYQGKEYFIFGRRATGYFDIRTLDGTKVNKGSISYKKLRIQDTAKAYLKEARAIPHMNEFTCVLA

SEQ ID NO: 21692 - protein, 430 aa, unidentified; identical to SEQ ID NO: 3252

SEQ ID NO: 21693 - protein, 419 aa, unidentified; identical to SEQ ID NO: 5677

SEQ ID NO: 21694 - protein, 447 aa, unidentified; identical to SEQ ID NO: 4640

SEQ ID NO: 21695 - protein, 742 aa, unidentified
MRGQPLMPCSPAKARHLLKAEKAVVKRRTPFTIQLRIATGETKQNVTLGVDAGAKHVGLSATTEKEEVFASEVELRQDITGLLATRLSLRRDRRHRKTRYRAPRFLNRVRSKHKGWLAPSVENRIQAHMSRIDAVCRLLPVTKIVIETASFDIQKIKDPSVEGTDYQQGDQLGFWNVREYVLFRDGHVCQHCHGRSKDKILNVHHLESRQTGGDAPNNLITLCETCHKACHAGKIKLKVKRGQSFRAEAFMGIMRWTLLDRVRKAHPGLPVENTYGYLTKNTRITLGLPKAHCVDAYCIAGNLKAVRRGVYLHQRQVRKHNRQIHKCTILLQTLEDGTKIGYRKLNQTPHMVKNFRLFDKVRCLGQTGFIFGRRSSGCFDVRRLDGVKLSSGISYRKLTLLEKRGTHLTELIKEDGASSSVRRQRFLRRVSMNKPCTYLLSALMASAVLAPVAALAADKSELEVRMEAAQKVLADRSYYERWSPEAALKTVEDAKAANEAGSARQKEIDGALDVMKDWCHTRFLVNACIKDARDLHHEREKEIRSVRLKADEMIRLDRVEQRRARQESQKQNVKQPMKLGGSTESPESRSESRAEEVKTKQSRAEERRALEEANVRAYEEKQARAARKAEERHDPIRVKSRVKAPSSPIEGHLGRTAADVEAGRAEAAERMAQEDANIAAFNAKQAEAKKRLEEAEATAAERKASREARQANFNKTLEERRAAQKRYEESRENKDSGLKKYF

SEQ ID NO: 21696 - protein, 411 aa, unidentified; identical to SEQ ID NO: 5658

SEQ ID NO: 21697 - protein, 423 aa, unidentified; identical to SEQ ID NO: 6991

SEQ ID NO: 21698 - protein, 515 aa, unidentified
MTALEERLSKTEYIYVLGFDGKPQMPTRRKRHVLKLLKTGRARIAEDIPFTIRLTYRNAPVLQPVTLAEDPGRTNIGAAVLSPLGGLLFSAVIETRNKEIKKLMADRKKSRQASRRGERKARQRLAKRYGSMVKSGMVMRKLPMYAADRFVTCKFIRNTQARFCNRKRCPDWITPTVQHLVQTHLNIIRKISRYLPVTDIAFEVSRFAFMHMENPKAMGVDFQNGPLKGYDDVKEAIRTQQHGKCLMCKKPIAHFHHIVPRSRGGSDTIQNLAGLCPECHTKVHTDTAFRKDFDRKKSGQLKKYGALSALNQAVPFICKKLLEEYGEEHVHFCRGLDTSLIRTALGFEKTKKNQMHEVDACCIGLAALEVNEVETPAFDHTFQIRQFRRQDRSIIHHQTGRSYYQGKEKVAQNRKPGFEQKTTALSQWYEEQVRIHGEKEAEKLRSQLRVEKSCRHYNDMDRFLPGAVFLYEGKRYVLSGRITNGKYLRACGQGMKNFPAAECTFIRHNAGLVFI

SEQ ID NO: 21699 - protein, 427 aa, unidentified; identical to SEQ ID NO: 3216

SEQ ID NO: 21700 - protein, 447 aa, unidentified; identical to SEQ ID NO: 8397

SEQ ID NO: 21701 - protein, 401 aa, unidentified; identical to SEQ ID NO: 14966

SEQ ID NO: 21702 - protein, 420 aa, unidentified; identical to SEQ ID NO: 3546

SEQ ID NO: 21703 - protein, 431 aa, unidentified
MPNKVYVINKHGRPLMPCSPAKARHLLDAGKAKVKKRTPFTIQLVYGSSGYTQEVILGVDAGSKTIGMSASTTKEELLSAEVKPRNDVVDLLSTRREFRRARRNRKTRYRKPRFDNRVRSKHKGWLAPSVEVKIQEHITAIRRVCGILPVSKVVVETAEFDLQLLKAIADGKPVPQGEDYQKGEMYGHYNVRQYVLWRDGYTCQCCGAHTTKKKEVRLHVHHLESRKVGGDAPDNQVTLCESCHEKLHKGLIAEKDFKKRKRKSTRDATFMGIMRKTLMQRLCSELPIPVIETRGYITKATREKLLVLPKSHTNDALAIAQGKQGFNVGYLPEIAQIDKIYTIRPVRHHNRQLYKATILKGGIRKSNQTKKYVFGYRLFDKVQFNGQDCFIWGRRTTGIFTIKTINGKMIKDGISFKKLKLAEKSTSYLIA

SEQ ID NO: 21704 - protein, 442 aa, unidentified; identical to SEQ ID NO: 2903

SEQ ID NO: 21705 - protein, 415 aa, unidentified; identical to SEQ ID NO: 5047

SEQ ID NO: 21706 - protein, 440 aa, Bacillus sp.; identical to SEQ ID NO: 19648

SEQ ID NO: 21707 - protein, 554 aa, Acidithiobacillus sp.; identical to SEQ ID NO: 7890

SEQ ID NO: 21708 - protein, 427 aa, Enterococcus sp.; identical to SEQ ID NO: 5630

SEQ ID NO: 21709 - protein, 424 aa, unidentified; identical to SEQ ID NO: 17364

SEQ ID NO: 21710 - protein, 459 aa, unidentified; identical to SEQ ID NO: 11427
  source 1..459: note = Cyanobacteria bacterium UBA11366

SEQ ID NO: 21711 - protein, 418 aa, unidentified
MVYVLGQDGHPLMPTCRHGKVKRMLKSGMAKVVKKCPFTIQLQYESTTHTQKINLGIDAGSKTIGVSATTESKVLYESEVVLRNDIVELLSGRRALRRSRRNRKTRYRKPRLDNRRRPDGWLAPSIRQKIKTHVTVVENVMKILPVTKIIVETASFDIQKIKNPEIEGAEYQYGEQLDFWNVREYVLFRDGHTCQCCKGKSKDNILNVHHIESRKTGGNAPNNLITLCETCHKAYHKGVITLPKEIHRGMRFRDAAFMGIMRWAFYDRLKELYTPFGVEVINTYGYITKNTRIEHGLPKEHYVDARCISGNPAAKPLGHYYFQKKVRCHNRQIHKNTILKGGIRKRNQAAYLVKGYRLFDKVKYQNQEYFIFGRRSSGFFDIRTLDGTKVNKGSISCKKLQLVEKSKHYLTEQRKVAA

SEQ ID NO: 21712 - protein, 421 aa, unidentified; identical to SEQ ID NO: 11064

SEQ ID NO: 21713 - protein, 422 aa, unidentified; identical to SEQ ID NO: 18257

SEQ ID NO: 21714 - protein, 451 aa, unidentified; identical to SEQ ID NO: 3199

SEQ ID NO: 21715 - protein, 278 aa, unidentified
MVYVVANDGQPLMPTERHGKVCRMLKSGMAKVVKKCPFTIQLQYESERNVQPVSLGVDAGSKHIGISATTKTKVLYESDVELRDDIVKLLATRRQLRRSRRSRKTRYRPVRFDNRKRKEGWLAPSIRQKIGSHLTVVANACKILPINQIIVETASFDIQKIKDPEIQGIEYQQGEQMDFWNIREYVLFRDGHICQCCKGRSKDKILNVHHIESRKTGGNAPNNLITLCETCHKGYHNGTVILPKNIKHGMQFKDAAFMGIMRWTFYNTLKEQYEPDIP

SEQ ID NO: 21716 - protein, 462 aa, unidentified
MGVLVIGQNGRALMPTTTRKARILLKENKASVVYRHPFTIHLRYKTGCATQEGSIGIDTGSQHIGVGVTCRDKVILKDEHELRSSMEKRSLMETRTTMRRGRRYRKVRYRKPKWRHHTKRMYFEKANRKGQHWRKVKTTTQSPRPKGWLPPSLQSKCDHHFRIIDRYLKYLPDSITKNLVIEVGRFDMARMNDPTIHGKMYQRGPMYDAENLRAYIFARDGYKCACCKAKAGSVRKEDGTTVKLVAHHILFRSRGATDNPKYMISVCDHCHTTKAHQPGGILYSWMEKNKKVTRGLRDATFMNILRRRLFDRFPQAAFTYGNITAVDRKRLLLPKSHANDAVAISLFGKDVSVINATCQTLRYKQVRKSKRSLHEATPRKGRKEPNTKAIRNKKNTTHVNGFKLWDSVLANGQKLFICGFTGSSAYLVDQDGHYVSPPGKTYKQWTLSNLSRLHPNGNWLMA

SEQ ID NO: 21717 - protein, 422 aa, unidentified; identical to SEQ ID NO: 5457

SEQ ID NO: 21718 - protein, 423 aa, unidentified; identical to SEQ ID NO: 3951

SEQ ID NO: 21719 - protein, 413 aa, unidentified
MRGRPLMPCSPAKARHLLKAGKAVVRRRTPFTIQLRIATGETKQSVTLGVDAGAKHVGLSAATEKEEVFASEVELRQDITGLLAARLSLRRERRQRKTRYRAPRFLNRVRSKHKGWLAPSVENRIQAHMSRIDAVCRLLPVTKIVIETASFDIQKIRNPEVEGTGYQQGDQLGFWNVREYVLFSDGHVCQHCHGRSRDKILNVHHLESRKTGGDAPNNLITLCETCHKAYHAGKIKLKVKRGQSFRAEAFMGIMRWTLLNRMRKAHPSLPVENTYGYLTKHKRITLGLPKTHCTDAFCIAGNLKAQRSGVYLYQKQTRKHNRQIHKCSILKGGVRKLNQSPYLVKGFRLFDKVKCLGQVGFIFGRRASGYFDVRTLGGKKLSPAIHAKKLTLLEKRKTFLTELRKESAASSPV

SEQ ID NO: 21720 - protein, 512 aa, unidentified; identical to SEQ ID NO: 3971

SEQ ID NO: 21721 - protein, 431 aa, unidentified
MPNKVYVINKHGRPLMPCSPAKARHLLDAGKAKVKKRTPFTIQLVYGSSGYTQEVILGVDAGSKTIGMSASTTKEELLSAEVKPRNDVVDLLSTRREFRRARRNRKTRYRKPRFDNRVRSKHKGWLAPSVEVKIQEHITSIKRVCRILPVSKVVIETAEFDLQLLKAIEEGKPVPQGEDYQQGEMYGHYNVRQYVLWRDGYTCQCCGAHATKKKEVRLHVHHLESRKVDGDAPDNQVTLCESCHEKLHKGLIAEKDFKKRKRKSTRDATFMGIMRKTLMQRLCSELPIPVIETRGYITKATREKLLVLPKSHTNDALAIAQGKQGFNVGYLPGIVQINKIYTIRPVRHHNRQLHKATILKGGIRKSNQTEKYVFGYRLFDKVQFNGQDCFIWGRRTTGIFTIKTINGKMIKDGISFKKLKPVEKSTGYLIA

SEQ ID NO: 21722 - protein, 406 aa, unidentified; identical to SEQ ID NO: 2973

SEQ ID NO: 21723 - protein, 302 aa, Parasutterella sp.
MPCSPAKARLLLKEKKAIVVRRTPFTIQLTIATGESKQPVSLDVDAGYKHVGLSASTEKAELYASEVELRQDITDLLSARRALRESRRNRKTRYRAPRFDNRIRTKRKGWLAPSVENRINAHLSRIESVLRLLPVTKITVETASFDTQLLKNPDISGKEYQEGEQLGFWNIREYVLCRDRHVCQHCYGRSKDPVLNVHHLESRRTGGDSPGNLITLCETCHKALHRGEITLKAKRGQSFRAEAFMGIMRSEVPNRLKASHPELEVNNTYGYRTKHARIANDIAKSHCADAFCIAGNLGAERL

SEQ ID NO: 21724 - protein, 470 aa, unidentified
MSVFVVGLNGCRLMPTSERKARLLLKEGKASVYRKVPFTIKLNYKTGSTVQPGYLGIDTGSQHIGITAVREDGTVLHKEEIGLRDSMTKRKLLESKASLRRGRRYRKTRYRHPKWRPETKRVYCEKPDRKGRHWKKQKNTFTSKRQAGWLPPSLQSKTDHHIRWIRKILGLLPEGYRLSIELGRFDPARMKDPEIHGELYQKGPQYDYENVRAYVLDRDRYTCQACKKKGGKLQVHHILYKSSGATDNPQYMATVCSDCHTLENHQPGGILYRWKQEQKKFTRGLRDATFMNILRKRLMEAFPDAVFTYGNITKVDREALKLPKSHANDATAIALVRTGITSIKDNEPVIHIQQVRRKKRSLHEENPRKGRKEPNRTASRNSKNTKSVTVNKKLGKIKTQVTAWLFDRVELDGKKGWISGFTGKSCYVKDRQDKYVCLSKKYDSVSITKLKILHHCGNWVVGAETTLGKG

SEQ ID NO: 21725 - protein, 536 aa, unidentified; identical to SEQ ID NO: 4526

SEQ ID NO: 21726 - protein, 420 aa, unidentified; identical to SEQ ID NO: 6718

SEQ ID NO: 21727 - protein, 418 aa, unidentified; identical to SEQ ID NO: 4327

SEQ ID NO: 21728 - protein, 472 aa, unidentified
VVGNNLLSIKPLINIGEGVIYSSICTGLSLQTYQKRKEVPYMVYVLDIDGQPLMPTTRHGKVRRLLNNHLAKVVKRCPFTIQLLYQSTKETQPVSLGVDAGSKHIGMAATTEKKVVYQEELSPRNDVVKLLSARRTLRRTRRNRKTRYRKPRFNNRAHSKHKGWLAPSVEVKIQEHITAIKRICQILPISEIHVETAEFDLQRLKAMDEGSPLPVGIDYQLGEQYDFYNTRQYVLHRDGYTCQCCGTHDNNIKLHVHHIESRQTGGDAPSNLIILCEHCHKALHEGKLELPKGKKRGKSYRDATFMGVMRKTLLERLKKEIDVPVEGTYGYITKYWRERAGLEKSHIHDAVCISKYPYAKPLDIYYLTKTVRHHNRQIHKSNFSKGGIRKRNQAPYLVKGLRLFDKVLYQGKEYFIFGRRATGYFDIRTLDGTKVNKGSISYKKLRIQDTAKAYLKEARAIPHMNKFTCILA

SEQ ID NO: 21729 - protein, 415 aa, unidentified
VAEMLKKYSFVLDADEKQLDPTIEQNTWRLIRQEKACLISKFPMIIKLNKIVKNPNQDEIRCGIDDGTNHVGLALVQKCQTRNKVLFKGVIEQRKDVKHLIDVRRNYRRYHRYHKRYRQQRFNNRASSKRSGRLPPSIKQRKQAIIRVINRLCKWIRINNYWLEDVKINIRALTDGFKPYKWQYQKPNRLDNNLRLAAIYRDSCQCIECGKKNTRFEVHHITPQSKGGADTISNLATLCPECHTKTFRQEEQFADRYYSLIGSTGNINGLADAQRVMQGKTWLREQLTQHGRLFLTTGADTANKRDDWNIVKTHSNDAICITDLEPENIDIEEWIIKPMRRKSKARTEQVCGFRHRDLVTYTYRNGEIHMGYVTALYPDKNKLSFQSPTKRCTGVNALKTKLLWRFNKIYWLKYS

SEQ ID NO: 21730 - protein, 301 aa, unidentified
KHKGWLAPSVEVKIQEHITVIKRICRILPITLVRVETAEFDTQRLRAMLAGKPLPVGTDYQLGEMYDEYNARQYVLKRDHYTCQCCGAHTTTMKSVKLHVHHLESRKVGGNAPSNLITLCTTCHANLHKRKVTLDGKKRGKTLRDAAFMGIMRKALMARLKEELSIPVQETYGYITKMRREQNDIKKSHVNDARCISKHPLAEPCSVCYRTKAIRHHNRQIHKANFSKGGYRKRSQISYIVEGYRLWDKVLYKGQECFISGRRASGRFALKKLDGTSISKSVTFKKLRLLEPATNYLIERM

SEQ ID NO: 21731 - protein, 512 aa, unidentified; identical to SEQ ID NO: 15053

SEQ ID NO: 21732 - protein, 431 aa, unidentified
MPNKVYIINKHGRPLMPCSPAKARHLLDAGKAKVKKRTPFTIQLVYGSSGYTQEVILGVDAGSKTIGLSASAETEELLSAEVKPRNDVVDLLSTRREFRRARRNRKTRYRKPRFDNRVRSKHKGWLAPSVEVKIQEHITSIKRVCRILPVSKVVIETAEFDLQLLKAIADGKPVPQGEDYQKGEMYGHYNVRQYVLWRDDYTCQCCGAHATKKKEVRLHVHHLESRKVGGDAPDNQVTLCESCHEKLHKRLITAKDFKKRKRRSTRDATFMGIMRKTLMQMLCSELPIPVVKTRGYITKATREKLLVLPKSHTNDALAIAQGKHGFNVGYLPGILQIDKIYTIRPVRHHNRQLHKATILKGGIRKSNQTEKYVFGYRLFDKVQFNGQDCFIWGRRTSGYFVVKTIDGKVIHNSASFKKLNLVERASNYLIA

SEQ ID NO: 21733 - protein, 406 aa, unidentified
MVYVLDKNGQPLMPTDRHRKVRLMLQSGQAKVIKRCPFTIQLTYNTGHQAQEISLGIDAGSKHIGVSATTKTRVLYEADVELRNDIVDLLSSRRELRRGRRNRKTRYRPARFDNRRREDGWLAPSIRQKIGTHLTVVENICKILPISRITVETASFDIQKIKNPDIQGAEYQQGDQLGFWNNREYVLFRDNHTCQCCKGKSKDKILNVHHIESRKTGGNAPNNLITLCEICHTGYHKGAIQLPKTVKRGMRFKDAAFMGIMRWAFYEALKQQYEPVGTPVHNTYGYITKHTRIEHNLPKEHYVDARCISGNPDAFPNGEYYYQKKVRCHNRQMHKLTILKGGIRKQNQATYLVKGYRLFDKVSYQRKEYFVFGRRKSGFFDIRTLSGKQVNKGSLSCKKRKRLNSG

SEQ ID NO: 21734 - protein, 463 aa, unidentified
  source 1..463: note = Candidatus Anoxychlamydiales bacterium
MQKLVGRDTYTPTDTPLVRSNCDLPLNKEETLSVSDLKTPSNNPEVDCPNIQGALKAFVYVISKNGIALMPCTKAKAKKLLREGKAQIVSYKPFTIKLLFECENQVQKVTLGIDPGYENIGFSAISEKKELFSTKVKLRTDVSKLLTEKRMYRRNRRIKLWYRKPRFLNRKKTKRLPPSLEHKLNSHLRIVKKILTFIPISKIIVEVANFDIQKIKNPQIENFQYQRGDLYGYQNLKAYLLQREQAKCQLCLKKSTKGNSFRLHHIIPRKDRGTNKVNNLSLLHEKCHDKLHKKKIFHLLKKNRQFKPETFMSSIRFKLATELKKLCSNISLSFGYMTKIKRDILKLEKNHHTDAFVIANGSFEKRVQPSLFLPKRKNNRCLQLNRKGFKPSIRRKRYKMQPKDVVQVKNKKYEVIGIFNKGNWLRVRDKTKTLNYPVKKVEKHIFINGWQFIPSLKERVFLP

SEQ ID NO: 21735 - protein, 465 aa, unidentified
MSTCVCVLSNNGERLMPTIRLGKVRHLLKDGKAKIIKHHPFTIQLLYDSETNIQPIEICEDVGYNYIGISVKSQSHEYVSAQYDTLQDKKSCHDACRRMRRTRRNRLRYRQKRFDNRKRDKGWLAPSLKHKKELNVNVIKMYCEVVPITHATVEVGSFDTMLVKAIEEGKATPEGADYQKGPRYNLATLREAVFYRDNYTCQVCGREASEGAILHVHHMFYWKGRHDNSLSELITVCEKCHTPANHQKGGKLYGFGEDIKFANLSGAAFMNTVRWQIVNELYAAFGKPFVTFTYGAMTKEKRIALHLEKSHNNDAYAMGEFHPNCRCTFEHYEKVRRNNRILEKFYDSRYIDIRTGEIATGKELFNGRINRSHKKDSENLHKYRGKRIRKGYRALRRKKVALNPGDLVSLNGEILTVHGTHTKKNGSVNVEFKTPSKSGKKSTSLKKLKIIKTISPMRSAWDKVS

SEQ ID NO: 21736 - protein, 456 aa, unidentified
MSTCVCVLSNSGERLMPTFRLGKVRRLLKDGKAKIVKHHPFTIQLLHDSKTNTQPIEICEDVGYNYIGISVKSESHEYVSAQYDTLQDEKACHDSCRKLRRTRRNRLRYRKPRFDNRKRGEGWLAPSLEHKKQLNIRLIERYVSVIPITHATVEVGSFDTMLLQAIQKGKSKPEGVDYQKGPRYNLATLREAVFYRDNYTCQVCGRKIADGAILHMHHMFYWKGRHGYQLDELVTACEKCHTPANHQKGGKLFGFGEDKEFANLSGAAFMNAVRWQIVDALHATYGKEFVTITYGAMTKEKRIILGIEKTHNNDAYAMGDYHPVHRCVFRHYQKRRRNNRVLEKFYDATYIDTRTGNKAKGKELFNGRISRNHKKNSEDLHKYRSKKVSKGRRSIRRQRYAIQPYDTVRLESKTYITSGCHNKGTRLLIPANGKSKSVAISKVQVVCHAGAWIQII

SEQ ID NO: 21737 - protein, 470 aa, unidentified; identical to SEQ ID NO: 2925

SEQ ID NO: 21738 - protein, 435 aa, unidentified
MRRVFVLDKKQKPLMPCQPARARHLLSSGKAAVFRREPFTIILQEREYGDTQPLELKIDPGSKTTGTALVIQGKNGCKVLWAGELHHRGLEIKASLLARNKIRRQRRNIHCRYRPQRGKRKRSKGLLMPSLRHRVLTVGNWVNRLCRWAPVSGLALELVRFDTQKLQNPEIEGVEYPRGELFGYEVREYLLEKWGRKCAYCGAEHVPLEIDHIAPRARGGTDRVSNLTLACRPCNERKGALPVEEFLKNDPERLKAIKAQAKTPLKDAAAVNSTRWALFEALKATGLPIETGSGGRTKFNRTRQGYPKAHWIDAACVGESGADVQIPQGLRALTIRAIGHGSRQMCLMDKYGTPRTKPKKVKRVLGFQSGDLVRLVQPKGKHKGVYVGKVSVRERGAFDIQDCINGERTKITAPHHRFTLLQRGDGYVYERPKPA

SEQ ID NO: 21739 - protein, 415 aa, unidentified
MVYVLDKDGHPLIPTNRHGKVRRMLKSGQVKVVKKCPFTIQLMYESEHNVQPVSLGIDAGSKRIGVSATTKTTVLYEADVELRDDIVKLLATRRQMRFFRRSRKTRYRPKRFDNRRRGKGWFAPSIRQKINTHLVTVARVCEILPVTQIIVETASFDIQKIKNPKIQGVEYQRGEQTDFWNVREYVLFRDGHVCQCCKGKKKDPILNVHHIESRKSGGDAPNNLITLCETCHKGYHNGTIKLPKRIKRGMKFKDAAFMGIMRWTFYNTLKEKYEPDIPVSMTYGYLTKNTRIQHNLPKEHYIDARCISGNPDAKSDGVYYYQKKIRCHNRQIHKFNTLRKGVRKLNQSEYLVKGYRIFDKVRYQGKEYFVFGRRKTGFFDIRTLSGEKANNGSLSIKKIAFVDTRKNYITERRTV

SEQ ID NO: 21740 - protein, 477 aa, unidentified; identical to SEQ ID NO: 5307

SEQ ID NO: 21741 - protein, 422 aa, unidentified; identical to SEQ ID NO: 9722

SEQ ID NO: 21742 - protein, 415 aa, unidentified
MIYVRSKDGKVLMPTERCGKIGYLLRHGKAHVVSRVPFVVQLDYETSTYTQDVSLGIDAGSKHIGVSASSKKKELFAAQVELRNDVVNLLSTRRELRRTRRNRKTRYRKASFNNRKKKDGWIAPSVEQKVKSHLKVIRLVRDLLPIAKTTIEVAQFDAQKIKNPDIKGEEYQQGEQMDFWNVREYVLARDGHRCVHCNGKSKDPILNVHHLESRKIGGNSPSNLVTLCETCHKAYHRGEFTLKIKRGRTLRDAAFMGIMRLAVYERAKSEFGNVHLTYGYVTKNTRIENGIAKTHAADAFCIAKNVHAMRLRTLFHCRCVARHTRALHVCNPKRGGMRRSCIASHKIGKSRFQRFDMVRWKGRECFIFGSTHGRPVLRDIEGYKMHENASVNIKTIKFLKRLRNNMLVEARTFKS

SEQ ID NO: 21743 - protein, 290 aa, unidentified; identical to SEQ ID NO: 18171

SEQ ID NO: 21744 - protein, 431 aa, unidentified
MPDKVYVISRLGHPLMPCSPAKARHLLDDKKAKVVKRMPFTIRLLYGSTKYIQPIILGVDAGSKTIGLSASTAKGEVFAAEVMPRNDVVENLSTRREFRRARRNRTTRYRKPRSDNRVRSNHERWLAPSVKVKIQEHITSIKRVCTILPISKVVIETAEFDLQLLKAIQEGKPIPEGEDYQKGEMYGSYNVCQYVLWRDNYTCICCGVRGTPKNPVRLHVHHFESRKYGGNAPDNHGTLCDDCHKKFHLGIITDVKLKTRRRQSTRDAAFMGIMRKTLMWRLRTELFIPVAETKGYITKATREKLLVLPKSHTRDALAIAQGRHGFGIKEYAYVEPANHIYTVRPVRHHNRQLHKASILKGGIRKRNQASKYVFGFRLYDKVLYQGKACFVWGRRTSGTFLLRTIDGIKVKDGVSYRNLTLLERSSNYLIA

SEQ ID NO: 21745 - protein, 470 aa, unidentified; identical to SEQ ID NO: 2825

SEQ ID NO: 21746 - protein, 411 aa, unidentified; identical to SEQ ID NO: 2867

SEQ ID NO: 21747 - protein, 449 aa, unidentified; identical to SEQ ID NO: 13052

SEQ ID NO: 21748 - protein, 392 aa, unidentified
MVYVINKEGQALMPTERFGKVRRLLKNGLAHVVCRIPFTIRLDYETTHFVQPISLGVDAGSKHIGISATTSKKELYAADVELRNDIVDKLSTRREQRRTRRNRLRYRKARFNNRVSSKHKGWLAPSVENKIQTHLTVVEKIHKFLPITKIIVETASFDIQKINNPSISSEEYQQGEQLDFFNVREYVLFRDNHTCQHCKGKSKDHILNVHHIESRKTGGNSPSNLITLCESCHKAYHNGKIDIKIKRGASFRDATFMGIARWTTYERLKNIYPNVSMTFGYITKNTRITNGLPKEHYVDARCISGNFLKGGRKKLNQSPFLVKGYRLFDLVEYQKKLYYIFGRRDSGFFDIRRLDGTKVNKGSISCKHIRLVDIRRNIITERRNSCSIPPTN

SEQ ID NO: 21749 - protein, 515 aa, unidentified; identical to SEQ ID NO: 5111

SEQ ID NO: 21750 - protein, 544 aa, unidentified
MKQKKQKVMIYILNKKGKPLMPTTRCGHVRKLLDSKKAVVVNSNPFTIRLKYDTPNCVQDMFAGIDSGRENIGSGASNEDGDCLYLGELRTSNKLIKIKMTERAGFRRERRRHDRQNKQRKARKDHTEIQNGNIDICRTTISCKSVQISYPAAEESVTHKIIRGKEGKFANRHRDEGWITPSARQLVQMHMNDLRSICKILPISHVTLERVAFDFQKLENENIKAWEYGKGKLYGYDSPKKYIHDVQDGKCLVCGKPHIDYLHHIIPRSKGGSDNVSNIAGLCYDCHYGPMGVHNCQDTQDRLPELKNEANKQYKVSLLNSVMPVLIEEMDKFCEANSIIFSICEGHDTAKVRDMYDLQKDHCLDGFAISLVGRNVKSVDVMPDRIYQKQRYKKKSKNIIQKRNCREYYDGKKLVAVNRHKGTDQKADSLEEYMNTYAETHTADECKKHFDSLTVKPARRTYTFHKKGCICPFHIGDKVRYEKKNKIKGNTKVETFICESIHFYKDENKAKVEHNKTKSKRMKFCRVLEAGCTPYIDYRKLALM

SEQ ID NO: 21751 - protein, 504 aa, unidentified; identical to SEQ ID NO: 3854

SEQ ID NO: 21752 - protein, 427 aa, unidentified; identical to SEQ ID NO: 5922

SEQ ID NO: 21753 - protein, 264 aa, unidentified
VAEGKPVPQGEDYQKGEMYGHYNVRQYVLWRDGYTCRVCGAHGSVKKGVPLHVHHLESRKVGGDAPDNLVTLCTACHDKLHKGIITAADLKKRKRRSTRDATFMGIMRMTLLRRLREQLPVPVVETRGYITKATREKLLVLPKSHTNDALAIAHGPQGFRAGYLPNIRQADRLYTIRPVRHHNRQLHKATILKSGVRKANQAETYICGFRLYDKVLYNGIECFVWGRRTSGSFLLRQLNGEKVKDGVSHKHLKLLERSQSYLVA

SEQ ID NO: 21754 - protein, 500 aa, unidentified
VAITLEIGDFQMLNRNSVFVLDTNKNPCDPIHPGKARKLLSQNKAAVFRQYPFTIILKEVSKPTKKYRIKIDPGAKFTGLALLSKANIVWCAELEHRGFQITEALTKRRTLRTTRRNRKTRYRKARFLNRKRPKGWLPPSLMSRVFNIESWVKKLCRLAPVSAISMELVRFDTQKMVNPEISGTEYQQGELMGYEVRQYLLEKFNRTCVYCGAKEVPFNLDHFHPKSKGGSNRVSNLVLSCVPCNQNKDNQLPADFLSDKPKLLALIENQRKKPLADTAAVNTTRWKLKEVLESSGLPVEVGSGRLTKYNRKRLGISKSHWSDAACVGVSTPNTLNIQNYQPLLIKAMGHGSRQMVKPDKYGFPRTSPKLRQKSFYGFQTGDIVKAVVTKGKKIGTYVGRVAVRKTGSFNIKTKTETVQGISHKYCKHLHKSDGYTYSFGELVKQKTVNFVQKVGQVLDTPVQLSLFDISELTTETKSQTKRGQHTKKFDGLDGEQLSLF

SEQ ID NO: 21755 - protein, 366 aa, unidentified
KHVGLSASTEKAELYASEVELRQDVSDLLSARRALRQSRRSRNTRYRAPRFDNRIRTKRKGWLAPTVENRINVHLSRIETVLRLLPVTKITVETASFDTQLLKNPDIAGKEYQEGEQLGFWNVREYVLFRDGHVCQHCHGRSKDPVLNVHHLESRRTGGDSPGNLITLCETCHKALHRGEIKLKAKRGRSFRAETFMGIMRWGVLNRLKASHPKLEVHNTYGYRTKHARIANGIAKSHCADAFCIAGNFGAKRLGEFFFQKQTRRNNRQIHKLSILKGGIRKRNQAPFEVKGFRLFDKVACQGEEGFIFGRRSTGYFDVRKLDGTCISAGISYKKLHLLEKRRTYLTEIRKEEALPPPPEGRGLRA

SEQ ID NO: 21756 - protein, 408 aa, unidentified; identical to SEQ ID NO: 6548

SEQ ID NO: 21757 - protein, 470 aa, unidentified
MSVFVVGLNGCRLMPVSERKARLLLKGGKASVYRKVPFTIKLNYKTGSTVQPGYLGIDTGSQHIGVSVVRQDGTVLHKEEIGLRDSMSKRKLLESRASLRRGRRYRKTRYRHPKWKPKTKRIYSEKADRKGRHWKKQKNMFTSKRQAGWLPPSLQSKTDHHIQWIRKLLHLLPEGYRLSIELGRFDPARMKDPGIHGELYQKGPQYDYENVRAYVLARDGYTCRVCKKKGGKLHVHHILYRSRGASDDPKYMAAVCSNCHTTENHLPGGILYQWMQDQKKFTRGLRDATFMNILKKRLRRAFPDAVFTYGNITKADREKLGLPKSHGNDATAIALVKTEVKSVKDEEPVIHIQQVRRKKRSLHEETPRKGRKGPNRTASRSDKNTKSVTVTKGSGEKKASMTACLFDRVELDGKKGWITGFTGTSCYVKDKEDNYICTSPKYKQVSISKLRILHHCGNWVIGAEKPLGKG

SEQ ID NO: 21758 - protein, 384 aa, unidentified
MEKESVQRVFVLDKNKQPLMPCHPARARELLKKGKAAVFRYHPFTIILKDREGGDTQPIQVKIDPGSKITGVTLVGDFKNGKKVIWGAEIHHRGQSIKKALDTRRGVRRSRRNRKIRYRIARFDNRKRSKGWLPPSLISRVENILTWIKRIRRFSPITGISLELVRFDTQKLQDPEINGIEYQRGTLYGYEIKEYLLEKWGRKCVYCGKENVPLEIEHIVPKSKGGSDRISNLTLACHECNQKKGNQSIEEFLTNNPERLKQIKSESKRPLKDTAALNATRWYIFNQLRGNSLTAGKEELPIEVGTGGRTKYNRETQNYPKKHWIDAACVGESGQNVQIEPDMQVLEIKAMGHGMRRMCFVDKYGFPKNIVQKNEHIWDTKQAI

SEQ ID NO: 21759 - protein, 426 aa, unidentified
  source 1..426: note = Lachnospiraceae bacterium
MVYVLSKDGQPLMPTKRYGKVKHLLRSKRAKAIKRCPFTIQLTYDSDSYTQSITLGVDAGSKTIGLSATTKTQELYAAEVTPRNDISDLLETRRSLRSSRRNRKLRYREPRFLNRTKSKHPGWLAPSVRAKVDSHLKVIEDMTKILPISKIIIETASFDLQKIKAMELGLPTPEGTDYQKGELLDFVNVREYVFWRDNYTCQWCHGKSKSNILHTHHWAYWKGDHTDKPSSQITLCDKCNDSKNHKPEAKMLWGWEPKITFTAKGAAFMGIMRWSVYNELKEIYEPSGIHIKMTYGYITKANRIAYNLPKEHRVDARCITGYPDVLPAEEWYNSKKIRCHNRQIHKSNPKRGVRKLNQAPYMVNGYRLFDKVLFKNTECYITGRRSTGYFALKTLDGQKIHDSAKVKDLKLIEPRKLYLTERKAQV

SEQ ID NO: 21760 - protein, 430 aa, Microvirga sp.; identical to SEQ ID NO: 7723

SEQ ID NO: 21761 - protein, 440 aa, unidentified
VRRAVFYRHYPAVIILKDVDARNIYKLPSYRIKIDPGAVHTGIAIVCNETNEVMYFLQIEHRGSEVKKALITRKQTRRNRRSRETRYRRCKFKSGGDFDSSRKNGWLPPSVKSTADNVIHWVEKLCRYINITECSFEAVRFDSQLMDNPEIGGEEYQQGTLSGYELREYLMEHFRHTCQYCGGESGDPVLEWEHKIPRSRGGSDSVKNASLACSCCNRDKGNRTLEEYLEDSKHISPKGKSEKALNEARISHISGILEKGTIYGSNRYSAWVNSTRRYIEKYLFLMFDDVECCSGGRTKYNRIKLKLPKDHHYDALCVGSVPKEGYTDRTNSYVLYVKATGRGTRFRGQCNSCGVITVKYKNNSKRKFGFQTGDIVQLNKPKGKDTGQYTGKVAVRSSGSFDLIRKGCKRITANYKYFRMMQYSDGYEYLGPLRPIPHSA

SEQ ID NO: 21762 - protein, 417 aa, unidentified
MPCSPAKARLLLKEKKAIVKRRTPFTIQLTIATGEAKQPVALGVDSGYKHIGLSATTEKAELYASEVELRQDITDLLSARLALRRSRRSRKTRYRAPRFDNRVASKRKGWLAPSVENRIAAHMSRVEAVMRVLPVTAITVETAAFDTQLLKNPNIAGEAYQQGEQLGFWNVREYVLFRDGHVCQHCRGKSKDPILNVHHIESRRTGGDAPNNLITLCETCHKAFHRGEIKLKVKRGKSFKAETFMGIMRWTLFERLKKAHPELRVRNTYGYLTKHKRISHGIAKSHCADAYCIADNLGAKRLEGFFFQKQTRKHNRQIHKLSILKGGLRKKNQAPYEVKGFRLFDKVICKGEEAFIFGRRTSGSFDVRRLDGTRISAGINYKKLRLLEPRTTYLTEFRKEAALPHLHECRGFRAEFL

SEQ ID NO: 21763 - protein, 493 aa, unidentified; identical to SEQ ID NO: 3154

SEQ ID NO: 21764 - protein, 512 aa, unidentified; identical to SEQ ID NO: 5824

SEQ ID NO: 21765 - protein, 393 aa, unidentified
MVYVQDINGKPLMPTTRHGKVRRLLKDKKAVVVNLCPFTIKLMYVTSDYKQEIVLGVDAGTKHVGLSATTKSKELYSSEVILRNDIVDLLSTRRELRKARRNRLRYRKPRFDNRVKSKRLGWIAPSVIYKVDAKIRVVENVCSILPISRIVIEVAQFDTQKIKNPEISGKEYQEGDQLEFWNTREYVLARDGHKCQYCKGKSKDSILNVHHIESRKTGGDSPSNLITLCETCHKEYHKGNIDLKIRRGKSLRDAAVMGIMKWRLYEELKSRYDRVFMTFGYITKHNRIKYGIEKSHTSDAFVISKNINAKRIERQYLKRLIRRHNRQIHKMKILKGGKKKNNQAPFEVFGFRLFDKVLYNNKIFFVYGRRKSGSFNIRDFNGENSKDVSRKKV

SEQ ID NO: 21766 - protein, 431 aa, unidentified; identical to SEQ ID NO: 5232

SEQ ID NO: 21767 - protein, 462 aa, unidentified; identical to SEQ ID NO: 13564

SEQ ID NO: 21768 - protein, 473 aa, unidentified; identical to SEQ ID NO: 3562
  source 1..473: note = uncultured beta proteobacterium

SEQ ID NO: 21769 - protein, 394 aa, unidentified
LLHGSSGYKQKCIAGIDAGSKNIGIAVTTEDGRVIYKAQVELRQDIKENIETRRRLRRARRSRKKRYRKPRYLNRKRPEGWLPPSVRAKIEAHYNIIKRLSKIIPISEIKVEVGQFDTQALQNPDIQGIEYQNGEMKGFDSVKEYVKIRDKFKCHYAELRPDISCSDKLTVDHIIPRSRGGTNNPSNLVCCCEAHNIAKGNMSYKEFTGKELPAIEDFRPATFMNVLRDYLVPRLMEIAPTSYTFGLYTRRTRKEWELEKSHINDAIAITGIKPKWQDDVWYCIRQVRKKKRSLHEEIPRRGRKEPNREAKRNSKNTKEIIVNGNKWCLWDKVYIPAINKTGYISGFSNNWVYVQDIFGNYLQISNKYKQINPKELVLLGRNNNFVCQQFISTL

SEQ ID NO: 21770 - protein, 420 aa, unidentified; identical to SEQ ID NO: 18287

SEQ ID NO: 21771 - protein, 443 aa, unidentified
LTKDENRPSGRTTGLRAEQAEPAGIRKGDTLKVFVLNMRGKPLMPCSPAKARHMLKAGKAFVVRRTPFTIKLTIATGETKQDVTLGVDAGARHVGISATTEKEEVFASEVALRQDITGLLADRLAFRRARRNRKTRYRAPRFNNRVRSKHKGWLAPSVENRIQAHISRIEAVCRLLPVTKIVIETASFDIQKIRNPEVEGTGYQQGDQLGFWNVREYVLFRDGHICQHCRGRSKDPILNVHHLESRKTGGDAPNNLITLCETCHKAYHAGKIKLKVKRGQSFRAEAFMGIMRWTLLDRVRKAHPGLPVENTYGYLTKHTRITHGLPKTHCADAFCIAGNLKALRRGDFLFQQQTRKHNRQIHKCSILKGGVRKLNQAPFLVKGFRLFDKVRIGGQIGFVFGRRVRGTFNIRRLDKTVIGTDINCKKLSLLETRKTFLTELRKE

SEQ ID NO: 21772 - protein, 452 aa, unidentified; identical to SEQ ID NO: 14544
  REGION 1..452: note = IscB polypeptide

SEQ ID NO: 21773 - protein, 442 aa, unidentified; identical to SEQ ID NO: 16198

SEQ ID NO: 21774 - protein, 429 aa, unidentified
QNKQRKARKDHTEIQNGNADICRTTISCKSVQISYPAAEKSVTHKIIRGKEGKFANRHRDEGWITPSARQLVQMHMNDLKSMCKILPISHVTLERVAFDFQKLENENIKVWEYGKGKLYGYDSPEEYIHDVQNGKCLVCGKPHIDYLHHIIPRSKGGSDKVSNIAGLCYDCHYGPMGVHNCQNTQDRLPELKSEANKQYKVSLLNSVMPVLIEEMDKFCKANSIMFSICEGHDTAKVRDMYDLQKDHCIDGFAISLVDRNVKSVDVMPDRIYQKQRYKKKSKNIIQKRNCREYYDDKKLVAVNRHKGTDQKADSLEEYMNTYAETHTTDECKKHFDSLVVKPARRTYTFHKEWRICPFHIGDKVRYEKKNKIKSNTKVDTFICEGIRFVKDENKAEVKHNKTKSKKMKFCRVLESGCTPYVDYRKLALM

SEQ ID NO: 21775 - protein, 412 aa, unidentified; identical to SEQ ID NO: 6913

SEQ ID NO: 21776 - protein, 447 aa, Halolactibacillus sp.; identical to SEQ ID NO: 8599

SEQ ID NO: 21777 - protein, 512 aa, unidentified
MSTVYVLNKDGKPLMPTTRGGHVRHLLKEQKARVVRTNPFTIQLLYETDNLVQPLYLGIDPGRTNIGVAVVKTDGTAVFTAHLETRNKEIPKLMQGRKKARRARRTNGRRCRRQRRAKANGTISKKCVKQATAQNGSVSKRANEIGVIKRHLPGCEKEVLCIGIKNKEAKFSNRTRPEGWLTPTANQLLQTHINLVKKIQKFLPISDVVLEINKFAFMRLDNPNVQKWQYQQGPLYQKASLEEAVSEMQEHHCLFCKNTIDHYHHVVPQSENGSNTIGNIVGLCTKHHDLVHKDTSWQKKLAKKKTGLNKRYGALSVLNQIIPALTKELSSLFPKHFFATNGKSTYDYRAAHGVSKDHWLDAYCIAGSVLPNDACDNNINNHVPYELKQFRRHDRRALHKENMGRVYTLNGKSVATNRHKAIKQTTDSLEEFRQRQPNDVCKLKVKEHHPEYRNPKRNFPGCVFLVGKHTHVMQGTSGSHNGKADGYYDTNGNSYSSGKCKFVVKNEGIVFT

SEQ ID NO: 21778 - protein, 455 aa, unidentified
MVFVLDRHHKPLMPCHPARARRLLGKGRARIHKLYPFTIRLVDRELKDSTVQPVVLKLDPGSKETGMALVREDETKTHHALYFVNLKHRGSEIKQSLLQRSSFRRSRRSRNLHYRAPRFLNRTRPQGWLAPSLQHRVDTTLSWVERLRKLAPVATLEMELVKFDTQKMQNPEIDGVAYQQGKLAGFEVREYLLEKFGRKCIYCGTEGVPLNIDHIVPKSAGGSNRVSNLVLACVDCNQKKNNLPFEVFLKGDKAKINRIRSQLKTPLKDAASVNTTRWQLFEALKLTGLSLTTATGARTKYNRHQFGVPKEHWLDALCVGKVAAIRGWQTLDVLVVKCTGRGAYKRTRLTKDGFPRGYLTRTKRFFGFGTGDMVVATVFAGKKKGSYKGRVAVRKSGSFAIQTASRKVDGISYRYCRFLSRADGYGYSWHSSKSLINSTKETALLPRINTQVSAP

SEQ ID NO: 21779 - protein, 454 aa, unidentified
  VARIANT 376..427: note = X can be any naturally occurring amino acid
VDTNKQPLDPVHPGWARKLLNTGQAAVFRRYPFTLILKKQVAEEVARPLRLKLDPGSKTTGFALVDDQNGEVVFAAELTHRGQQIKNALHARRAVRRSRRQRKTRYRAPQFDNRRRPKGWLAPSLESRMATTLTWTRRLMRVCPITEISMELVKFDMQLMDHPEIAGIEYQQGELAGYEVREYLLEKWGRRCAYCDAKDVPLQIEHLVCRARGGTDRVSNVCLACEPCNRKKGTQDISVFLKRDPVRLARLLAQAKAPLRDAAAVNTTRWVLYDRLKTFGLPIECGSGGLTKYNRVKLGFPKAHWTDAACVGKSTPQELCVKGVTPLLITAMGHGSRQMCRMNKRGFPRTGPKAARRVKGFQTGDIVRAVVPTGKXXXXXXXXXXXXXXXXXXXXXXXXXXXXXXXXXXXXXXXXXXXXXXXXXXXXTNNFSVRWQLRWKAALAFHCQQCLLNV

SEQ ID NO: 21780 - protein, 431 aa, unidentified; identical to SEQ ID NO: 12062

SEQ ID NO: 21781 - protein, 315 aa, unidentified
RRGYRQRRRYWKRYRKERFSNRASTRRKGRITPTILQKRQAVVRVVDRLSKYIRIDSIYLEDVAIDVRVLTDEKKLYSWQYQRSNRLDENLRKATILRDNCKCQLCGKRNCRLEVHHITPRRMDGANTIGNLITLCSECHSNVTGREIEFAEQLYSKIGKKKNNASLQYASHVMVGKTWLREELSKRTPVFLTTGGDTANKRIDWNLEKSHEIDAVCITNLEPESVGVKPWNVKPLRHQRKTMKVKEILGFRHRDIVCYTFKNGEYHEGYVTALYPSEGKQKEGLNFLSPTKHCKRVNPKKCQRLDRPDKFLWLA

SEQ ID NO: 21782 - protein, 424 aa, unidentified
MRVFVFNMRGRPLMPCSQRKARLLLSENKAMIYKYHPFTIQLTYTTGETKQDCHIGIDTGSKYIGAAVRSEDKVFWKGEIELRQDIRSNLDTKRIYRRSRRNRKTRYRKPRFLNRKRRDEWLPPSLQSRINHTFHWIDTLSSLVPNPILHIEVGKFDVAKMINPEIHGVDYQHDQTYGFFDERYFVFARDNYTCQCCGKSKNKILNTHHIIYRSNGGTNRVDNLITVCTDCHTSQNHRKGGIFYQWQEQHKKVKQYKEPPFMNTLRKRIFVAYPDAEITYGSETTPKRKAMKLDKTHYNDAIVISGINEIKENPEEWLLIKQFRKKKRSLHEATARKGRKKPNRNQTRNSKNTPYYKGFYLNDKVSVFGKSGYITGFTSNAAYIKDENNDYITLPNKTYKQVSINKMKLECHNNNWQYIIKNAV

SEQ ID NO: 21783 - protein, 284 aa, unidentified
LPVSKVVVETAEFDLQLLKAIADGKPVPQGEDYQKGEMYGHYNVRQYVLWRDNYTCQCCGTHPSKKKEVRLHVHHLESRKVGGDAPDNQVTLCESCHEKLHKGLIAEKDFKKRKRKSTRDATFMGIMRKTLMQRLCSELPIPVVKTRGYITKATREKLLVLPKSHTNDALAIAQGKRGFNVGYLPEIAQIDKIYTIRPVRHHNRQLHKATILKGGIRKSNQTEKYVFGYRLFDKVQFNGQDCFIWGRRTTGIFTIKTINGKMIKDGISFKKLKPVEKSTGYLIA

SEQ ID NO: 21784 - protein, 430 aa, unidentified; identical to SEQ ID NO: 7436

SEQ ID NO: 21785 - protein, 493 aa, unidentified; identical to SEQ ID NO: 10546

SEQ ID NO: 21786 - protein, 389 aa, unidentified
VTTILKTCFAASNLAKIVVLMDAWDIIVVLNKRGKPLMPCSPAKARHLLKEKKAAVVRRTPFTIQLTIATGESKQPVSLGVDAGYKHVGLSASTEKAELYASEVELRQDITDLLSARRALRQSRRNRKTRYRAPRFDNRIRTKRKGWLAPSVENRINAHLSRIETVIRLLPVTKISVETTSFDMQLLKNSDIAGKEYQEGEQLGFWNVLEYVLFRDGHVCHHCYGRSKDSVLNVHHLESRRTGGDSPGNLITLCETCHKALHRGGITLKAKRGQSFRAEAFMGIMRWEVLNRLKASHPELEVNNTYGYWTKHARIANGIAKSHCADAFCIAGNLGAERLGEFFFQKQTRRNNRQIHKLSILKGGIRKRNQVPFEVNGFRLFDKVACKGE

SEQ ID NO: 21787 - protein, 417 aa, unidentified
MPCSPVKARLLLKEKKAIVKRRTPFTIQLTIATGEAKQPITLGVDSGYKHIGLSATTEKAELYASQVELRQDITDLLSARLALRRSRRSRKTRYRAPRFNNRVASKRKGWLAPSVENRIAAHMSRVEAVMRVLPVTAITVETAAFDTQLLKNPNIAGAAYQQGEQLGFWNVREYVLFRDGHVCQHCRGKSKDPILNVHHIESRRTGGDAPNNLITLCETCHKAFHRGEIELKVRRGKSFKAETFMGIMRWTLFERLKKAHPELRVRNTYGYLTKHKRISYGIAKSHCADAYCIADNLGAKRLEGFFFQKQTRKHNRQIHKLSILKGGLRKKNQAPYEVKGFRLFDKVICKGEEAFIFGRRTSGSFDVRRLDGTRISAGISYKKLRLLEPRTTYLTEFRREAALPPLHKCRGFCAEFL

SEQ ID NO: 21788 - protein, 470 aa, unidentified; identical to SEQ ID NO: 2949

SEQ ID NO: 21789 - protein, 430 aa, unidentified; identical to SEQ ID NO: 3328

SEQ ID NO: 21790 - protein, 452 aa, unidentified
MSVLVIGRNGRALMPTTSRKARLLLKKKIASVVCRHPFTIQLLYKTGCATQEGCIGIDTGSQHIGVGVTCGDRVILKEEHELRSSMEKRSLLVTRAAMRRGRRYRKVRYRKPKWRHHTKRMYFEKPNRKGQHWRKVKTTTQSPRPKGWLPPSLQSKCDHHFRIIDRYLKYLPDSITRNLVIEAGRFDMARMNDPMIHGEMYQRGPMYDAENLRAYIFARDGYQCACCKAKAGTTRKTDGTTVKLVAHHILFRSRGATDNPKYMVSVCDHCHTTKAHQPGGVLYSWMERNKKVTRGLRDAAFMNILRQRLFARYPQAAFTYGNITAADRKQLRLPKSHANDAVAISLFGKEVSAVRDTCQTVHYKQVRKSKRSLHEAIPRKGRKRPNTKAVRNKKNTTQVNGFKLWDSVLANGKKLFICSFTGTSAYLIDKNGCYVSQPGKTYKQWPLSMMLY

SEQ ID NO: 21791 - protein, 431 aa, unidentified
MPNKVYVINKHGRPLMPCSPAKARHLLDAGKAKVKKRTPFTIQLVYGSSGYTQEVILGVDAGSKTIGVSALTKKEELFAANVIPRNDVVDLLSTRREFRRARRNRKTRYRKPRFDNRVRSKHKGWLAPSVEVKIQEHITTIRRVYGILPVSKVVVETAEFDLHLLKAIADGKPVPQGEDYQKGEMYGHYNVRQYVLWRDDYTCQCCGAHATKKKEVRLHVHHLESRKVGGDAPDNQVTLCESCHEKLHKGLIAEKDFKKRKRRSTRDATFMGIMRKTLMQRLYSELPIPVIETRGYITKATREKLLVLPKSHTNDALAIAQGKRGFNVGYLPEIAQIDKIYTIRPVRHHNRQLHKAAILKGGIRKSNQAGKYVFGYRLFDKVQFNGQDCFIWGRRTTGIFTIKTINGKMIKDGISFKKLKPVEKSTSYLIA

SEQ ID NO: 21792 - protein, 408 aa, unidentified; identical to SEQ ID NO: 11651

SEQ ID NO: 21793 - protein, 405 aa, unidentified
LLKKGKASVYRRFPFTIILNERVGGSTQPTELKYDPGSKTTGISLVVHGKTASRVVWAGELTHRSWNIIEALNTRRNVRKFRRYRKTRYRQPRFLNRTRKDKWLPPSIQSRVDNIVTTTRKLKVFAPLSLLACEVVKFDTQKLRNPEIDGAEYQRGTLFGFELWEYLLVKWNHSCAYCNAKNTPLEKEHVVAKSKGGSNSVTNLVVSCRPCNEKKGNKSIEEFLKKKPSVLKKIKLQLKAPLKDAASMNATRYAIARELEIFNLPVNYGTGGQTKYNRTNQGYRKEHWIDASCATSTGENIQILDTMTPLIIKAVGRGSRKMCQTDGYGFPSSKPKAVKRIKGFQTNDIVKAIVTKGKKKGVYVGKVSIRSTGRFNIKTKQGTIQGINHRYCNLLQRIDGYEYHT

SEQ ID NO: 21794 - protein, 460 aa, unidentified; identical to SEQ ID NO: 8636

SEQ ID NO: 21795 - protein, 412 aa, unidentified; identical to SEQ ID NO: 4932

SEQ ID NO: 21796 - protein, 417 aa, unidentified; identical to SEQ ID NO: 17640

SEQ ID NO: 21797 - protein, 431 aa, Moorena sp.
MRVFVLNKNRQPLDPCKPARARILLSAGKAKVYRRYPFTIILAEEVKRPITHEHQLKIDPGAKTSGLAIVQGKRVIWGSELTHRGFQIREALISRRQLRRSRRNRKTRYRKPRFLNRTRPKGWLAPSLTSRVQNILTWVKKLSRFCPVTGISQELVRFDTQKLQNPEISGIEYQQGTLYGYELREYLLEKWNRKCAYCGVTGTQLEVEHIKPLSKGGSNRVSNLAIGRRPRYANACRPCNQAKSNQDIELFLSKKPSILKRILSQAKRPLADAASVNTTRWKLYHDIKSIGLPVEVGSGGLTKFNRCRQSLPKTHWLDAANVGKVETLIVEVTLPLVITAKGHGTRQLCRTNKYGFPTRHCSRIKFHKGFQTGDIVRAVVTKGKKIGTYVGRVATRKSGSFNISTKSGLVQGISHKYCKFIHRKDGYAYTN

SEQ ID NO: 21798 - protein, 414 aa, unidentified
MPCSPAKARLLLKEKKAIVVRRTPFTIQLTIATGEAKQPVSLGVDAGYKHVGLSASTEKAELYASEVELRQDITDLLSARRALRQSRRNCKTRYRAPRFDNRIRTKRKGWLAPSVENRINAHLSRIEAVLRLLPVTKITVETASFDMQLLKNPDISGKEYQEGEQLGFWNIREYVLCRDGHVCQHCYGRSKDPVLNVHHLESRRTGGDSPGNLITLCETCHKALHRGEITLKAKRGQSFRAEAFMGIMRWEVLNRLKASHPELEVNNTYGYRTKHARIANDIAKSHCADAFCIAGNLGAERLGEFFFQKQTRRNNRQIHKLSILKGGIRKRNQAPFEVNGFRLFDKVACKGEEGFIFGRRSSGFFDVRKLDGTRISAGISYKKLHLLEKRRTYLTEIRKEEALPPLPEGRGLRA

SEQ ID NO: 21799 - protein, 462 aa, unidentified; identical to SEQ ID NO: 9356

SEQ ID NO: 21800 - protein, 430 aa, unidentified
LETRNKEVPKLMQDRKKARRARRTNGRRCRRQRRAKANGTISKKCVKQDTAQSKNPSKRAKEIGIIKRRLPGYKKDVLCIGIKNKEAKYTNRTRPEGWLTPTANQLLQTHINLVRKMQKFLPISDVVLEVNKFAFMRLDNPDIQKWQYQQGPLYQKGSLENAVSEMQEHHCLFCDKPIDHYHHVVPQSENGSNTIANIVGLCAEHHNLVHKDAAWQKKLAEEKVGLNKKYGALSVLNQIIPALTNKLSVLFPKHFFVTAGKSTHDYRAAHGVSKDHWLDAYCIACSVLPSNVCDSNINNHMPYELKQFRRHDRRVLNNENMNRVYTLDNKAVAINRHKATEQEAASLEEFRKEHPNDVCKLKVKEHHPTYRNMNRNYPGSIFLVGKHVHIMQGIAGSKDGKATTYKDSNANSITASKCKFVAKISGILFV

SEQ ID NO: 21801 - protein, 408 aa, unidentified
MVYVLSKNGKPLMPTKRYGKVRRLLKQKLARVVRREPFTIQLLYDTTEYTQDVVVGVDIGSKTVGISAVSEKEELFSAEITLRTDVKGLLLDRRAYRKNRRYRKRRYRKPRFLNRRRPNAWLPPSIKWKVNAHLRIINFLSKILPISKIVVEIAPFDIHKIINPNVNGKEYQEGVQKGFWDVREYCLWRAGYRSEISGKQGILEVHHIIPRSQGGTDNPSNLIVLTLEEHKAIHKGKLKIPKSKLEKIKILKDASHVSVIGWYIVNKLKEKYNVEITYGSITKAKRMEIGLEKAHRNDAFVIASGNKNIKRLNYWYIGRFFRRQNRSLHKAKPIKGGKRPVNTIKQAYGFRRFDKVEYQKRDYLILGLRSSGYFLIGSITGEKMHDSVKYNKLKLLESAKTLMFERKI

SEQ ID NO: 21802 - protein, 470 aa, unidentified; identical to SEQ ID NO: 2925

SEQ ID NO: 21803 - protein, 436 aa, unidentified
MTKTLTKQTTQACVLDQQGKPLMPTTRLGKVYRLLKTQKAHIVSHEPFTIQLNYEPDTHIIQPMTLGVDSGAIHSGYSVTNENREYYSAEVIARDNISKRLLNRRMYRKNRRSRKTRYRKPRFKNRKNEKKGWLPPSLKQKVTVQLKEIDHLHHHFPIETIIVEVAEFDIQKIKNPDISGIEYQQGTLQGYNIRNYLLEKHGRKCFYCEKTVSKFEVEHMIPKTRGGSNRIDNLTLSCHECNQKKDTLTAEEFIKQILPAKKATAKLKQLPNEKRLFKYMAHMNATRWSLYNTIKEKYANVKMTYGYITKYNRIQAGLPKAHHIDAKCITGFTTVPSIDQTVVKIKMRRHNRQLHQLTFSKGHVRKAASLPTIIFGFQLYDLVLFNNHRYYIKSRRSSGSFDLVSIEGLKDTNRSYKKLTLLAHTNAYLTNRYTNE

SEQ ID NO: 21804 - protein, 429 aa, Parasutterella sp.; identical to SEQ ID NO: 3656

SEQ ID NO: 21805 - protein, 465 aa, unidentified
MSTCVCVLSNSGERLMPTFRLGKVRRLLKDGKAKIVKHHPFTIQLLYDSKANTQPIEICEDVGYNYIGISVKSQSHEYVSAQYDTLQDEKACHDSCRKLRRTRRNRLRYRKPRFDNRKRGEGWLAPSLRHKKELNVNVVKMYCAVMPITHATIEVGSFDTMLVKAIQEGKAIPEGADYQKGPRYNLATLREAVFYRDNYICKVCGRKATEGAILHMHHMFYWKGRHGNSLSELITVCEKCHTPANHQKSGKLYGFGENVKFADLSGAAFMNTVRWQIVNELYAAFGKDFVTVTYGAMTKEKRIALHLEKSHNNDAYAMGSFHPVNRCAFEHYEKVKRNNRILEKFYDSQYIDTRTGELTNGKSLFNGRISRSHKKDSENLHKYRGKRICKGHRALRRKKLALNPGDLVSLNGEILVVHGTHTKKNGSVNVEFKTPSRGGKKSASLKKLKIVKTSNLMHSAWTKVS

SEQ ID NO: 21806 - protein, 426 aa, unidentified
MVFVLDTNKKPLSPCHEAVARKLLKQGKAAIFRRYPFTIILKKAVEDIKNKQEYRLKIDYGSKHTGLAILQNNNVIWLAQIGHRTDIKKKLDDRRMFRRNRRNRRTRYRKPRFLNRKRKEGWIPPSLESRVNNVKTWVKRLQKLVPLTHISYENVKFDTQLMQNPEISGIEYQQGTLQGYEIREYLLEKFGRKCCYCSKENIPLEIEHIIPKSRGGTNRVDNLCLSCRECNQKKGNMTAEEFGYPNVQRQVKQSLKDSSVVNSTRWKVYDVLCNSGLEVECGTGALTKMNRIKLGLPKEHYFDACCVGQSTPDKLYFKTKDVLYIKAKGRGSHCRTNLDKYGFPRGYLARQKYFFGFQTGDMVKAEIPKGKYKGIWYGEVACRKSGSFDIKDKEGQRVVQGVNHKYFSVVQHFDGYSYRKEVANLI

SEQ ID NO: 21807 - protein, 432 aa, unidentified
MQPTKQQNWVFQINGDKQPLDMIHPGRCRELQNRGKLASFRRFPYVVIQQQTIESLQTKEYILKIDPGSQWTGFAIQCGDNILFRAELNHRGESIKFDLVKRAWFRRGRRSRNLRYRKKRLNRAKPEGWLAPSIRHRVLTVETWIKRFMRYCPIAWIEIEQVRFDTQKLANPEIDGVEYQQGELQGYEVREYLLQKWGRKCDYCGTENVPLEVEHIQSKSKGGSSRIGNLTLACHVCNVKKGNLDVRDFLAKSPDILNQVLENSTKPLKDAAAVNSTRYAIVKMAKSICENVKCSSGARTKMNRVRQGLEKTHSLDAACVGESGASIRVLTDRPLLITCKGHGSRQSIRVNASGFPAVKNAKTVFTHIAAGDVVRFTIGKDRKKAQAGTYTARVKTPTPKGFEVLIDGARISLSTMSNVVFVHRSDGYGYEL

SEQ ID NO: 21808 - protein, 442 aa, unidentified; identical to SEQ ID NO: 16323

SEQ ID NO: 21809 - protein, 406 aa, unidentified; identical to SEQ ID NO: 5685

SEQ ID NO: 21810 - protein, 489 aa, unidentified
VTDVSTIYVLNKDGKPLMPTTRCGHVRYLLKEKKARVAASKPFTIQLLYETNDVVQPLYLGIDPGRTNIGVAVVKTDGTAVFTAHLETRNKEIPKLMQGRKKARRARRTNGRRCRRQRRAKANGTISKKCVKQTTAQNGSVSKRAKGIGVIKRHLPGCEKDVLCIGIKNKEAKFSNRTKSEGWLTPTANQLLQTHINLVKKIRKFLPISDVVLEINKFAFMQLDNPNVQKWQYQQGPLYQKANLEEAVSEMQEHHCLFCKKPIAHYHHVVPQSENGSNTIGNIVGLCTKHHDLVHKDTAWQKKLAKKKTGLNKKYGALSVLNQIIPALTKELGSLFPKHFFATNGKSTYDYRAAHGVRKDHWLDAYCIACSVLPNDVCDKNINSRVLYELKQFRRHDRRALNNENMSRVYTLNENVVATNRHKATKQTTDSLEEFRQNHPDDACKLKVKEHHPTYRNMSRNYPGSVFLVGNQVHVMQGVAGSKDGKATT

SEQ ID NO: 21811 - protein, 470 aa, unidentified; identical to SEQ ID NO: 2825

SEQ ID NO: 21812 - protein, 420 aa, unidentified; identical to SEQ ID NO: 19265

SEQ ID NO: 21813 - protein, 470 aa, unidentified
MSVFVVGLNGCRLMPVSERKARLLLKGGKASVYRKVPFTIKLNYKTGSTVQPGYLGIDTGSQHIGVSVVRQDGTVLHKEEIGLRDSMSKRKLLESRASLRRGRRYRKTRYRHPKWKPKTKRIYNEKADRKGRHWKKQKNTFTSKRQAGWLPPSLQSKTDHHIQWIRKLLHLLPEGYRLSIELGRFDPARMKDPGIHGELYQKGPQYDYENVRAYVLARDGYTCRVCKKKGGKLHVHHILYRSRGASDDPKYMAAVCSNCHTTENHLPGGILYQWMQDQKKFTRGLRDATFMNILKKRLRRAFPDAVFTYGNITKADREKLGLPKSHGNDATAIALVKTGVTSVRDEEPVIHIQQVRRKKRSLHEETPRKGRKEPNRTASRNDKNTRSVTVSKGSREKKVSMTACLFDRVELDGKKGWITGFTGTSCYVKDKEDNYICTSPKYKQVSISRLRILHHCGNWAIGAEKPLGKG

SEQ ID NO: 21814 - protein, 426 aa, unidentified; identical to SEQ ID NO: 13414

SEQ ID NO: 21815 - protein, 470 aa, unidentified; identical to SEQ ID NO: 2825

SEQ ID NO: 21816 - protein, 470 aa, unidentified; identical to SEQ ID NO: 12303

SEQ ID NO: 21817 - protein, 330 aa, unidentified
LRVFVLNKRGKPLMPCSPAKARLLLKEKKAAVVRRTPFTIQLTIATGESKQSVSLGVDAGYKHVGLSASTEKAELYASEVELRQDISDLLSARRALRQSRRNRKTRYRAPRFDNRIRTKRKGWLAPSVENRINAHLSRIETILRLLPVTKITVETASFDMQLLKNPDISGKEYQEGDQLGFWNVREYVLFRDGHVCQHCHGRSEDPVLNVHHLESRRTGGDSPSNLITLCETCHKALHRGEITLKAKRGQSFRAEAFMGIMRREVLNRLKASHPELEVHNTYGYRTKHARIANGIDKSHCTDAFCIAGNLGAKRLGEFLFLSLIHISEPT

SEQ ID NO: 21818 - protein, 442 aa, unidentified; identical to SEQ ID NO: 3234

SEQ ID NO: 21819 - protein, 433 aa, Microcystis sp.; identical to SEQ ID NO: 6520

SEQ ID NO: 21820 - protein, 408 aa, unidentified
MVYVQDIDGKPMMPTTRHGKVRRLLKANKATVVNLCPFTIRLTYATSGYKQEIVLGVDAGTKHVGLSATTKSKELYSSEVILRSDIVELLSTRRELRRTRRNRLRYRKPRFGNRVKSKHHGWVAPSVRHKIDAHIRVIDNICSTLPISRIIVEIAQFDTQKIKNPDISGNEYQEGDQLGFWNVREYVLARDGHKCQHCKGKSKDPILNVHHIESRKTGGDSPSNLITLCETCHKEYHKGNIDLKVKRGKSLRDAAVMGIMKWKLYEELKSRYPNVSMTFGYITKYNRIKYGIEKYHISDAFVISKNFNALRLEYHYKVRLVRRHNRQVHKQKVLKGGAKKPNQSPFEVFGFRLFDRVMFEGNYYFIFGRRKSGSFNIRDINGGNQRNVTYKKLKLSIGKRFMIQKEMN

SEQ ID NO: 21821 - protein, 417 aa, unidentified
MPCSPAKARLLLKERKAIVKRRTPFTIQLTIATGEAKQPVTLGVDSGYKHIGLSATTEKAELYASQVELRQDITDLLSARLALRRSRRSRETRYRAPRFNNRVASKHKGWLAPSVENRIAAHLSRVEAVMRVLPVTAITVETAVFDTQLLKTPDIAGAAYQQGEQLGFWNVREYVLFRDEHVCQHCRGKSKDSILNVHHIESRRTGGDAPNNLITLCETCHKAFHRGKIKLKVRRGKSFKAETFMGIMRWTLFERLKKAHPELNVRNTYGYLTKHKRISYGIAKSHCADAYCIADNLGAKRLEGFFFQKQTRKHNRQIHKLLILKGGLKKKNQAPYEVKGFRLFDKVICKGEEAFIFGRRTSGSFDVRRLDGTRISAGINYKKLRLLEPRTTYLTEFRKEAALPPLHECRGFRAEFL

SEQ ID NO: 21822 - protein, 422 aa, Deinococcus sp.; identical to SEQ ID NO: 19900

SEQ ID NO: 21823 - protein, 449 aa, unidentified
TNIGVAVVKTDGTAVFTAHLETRNKEIPKLMQGRKKARRARRTNGRRCRRQRRAKANGTISKKCVKQTTAQNGSVSKRAKKIGVIKRHLPGCEKKVLCIGIKNKEAKFSNRTRPEGWLTPTANQLLQTHINLIKKIRKFLPVNDVVLEINKFAFMQLDNPNIQKWQYQQGPLYQKASLEEAVSEMQEHHCLFCKKSIVHYHHVVPQSENGSDTIGNIVGLCTKHHDLVHKDTAWQKKLAKKKTGLNKKYGALSILNQIIPALTKELSSLFPKHFFATNGKSTHDYRAAHDVSKDHWLDAYCIACSILPNDTCDKNINGRVPYKLKQFRRHDRRALHKENMSRVYTLDGKKVATNRHKAIKQTTDSLEEFRQRQPNDVYKLKVKEHHPEYRNPKRNFPGCVFLVGKHTHVMQGTSGSHNGKADGYYDTNGNSYPSGKCKFVAKNKGIVFA

SEQ ID NO: 21824 - protein, 414 aa, unidentified
MPCSPAKARLLLKEKKAIVKRRTPFTIQLTIATGESKQPVSLGVDAGYKHVGLSASTEKAELYASEVELRQDITDLLSARRALRQSRRNRKTRYRAPRFDNRIRTKRKGWLAPSVENRINAHLSRIEAVLRLLPVTKITVETASFDLQLLKNPDISGKEYQEGEQLGFWNIREYVLCRDGHVCQHCYGRSKDPVLNVHHLESRRTGGDSPGNLITLCETCHKALHRGEITLKAKRGQSFRAEAFMGIMRWEVLNRLKASHPELEVNNTYGYRTKHARIANDIAKSHCADAFCIAGNLGAERLGEFFFQKQTRRNNRQIHKLSILKGGIRKRNQAPFEVNGFRLFDKVACKGEEGFIFGRRSSGYFDVRKLDGTCISAGISYKKLHLLEKRRTYLTEIRKEEVLPPLPEGRGLRA

SEQ ID NO: 21825 - protein, 413 aa, unidentified
MTNYAFVLDANGKQLAPTKEQKAWFLIRKKRATLVSKYPMVIQLKKEIPDEQIYKDEICCGIDDGGLHVGISLVQKCKTKNKVVFKGTMEQRKDVKHLMEVRKGYRRYHRFYKRYRQARFNNRKSSKRKERIAPSILQKRQATIRVINQLNKWINITNYWLEDVAIDIRALTDDYKAYRWQYQQSNLLDENIRKAVILRDGCKCMECGKSNCKLEVHHIKPRRLNGSNTLGNLISLCKKCHQKTEEQEEVYMNRYFSMLNSSDNKNLNYAQHVMIGKKWLREQLSKLGTLTLTTGGDTANKRIDWNIEKSHSNDAICITGLQPDTCNIKEWTIKPMRRQSKAKTDNVLGINHRDLVEYTFRNGETHRGYVTALYPGQNAINFQSSTKHCKKVNAKKCKLIWKYSKIYWLANVQ

SEQ ID NO: 21826 - protein, 431 aa, unidentified
MPNKVYVINKHGRPLMPCSPAKARHLLDEGKAKVKKRTPFTIQLIYGSSGYTQEVILGVDAGSKTIGMSVSTTKEELLSAEVKPRNDVVDLLSTRREFRRARRNRKTRYRKPRFDNRVRSKHRGWLAPSVEVKIQEHITSIKRVCRILPVSKVVVETAEFDLQLLKAIADGKPVPQGEDYQQGEMYGHYNVRQYVLWRDGYTCKCCGAHTTKKKEVRLHVHHLESRKVGGDAPDNQVTLCESCHEKLHKGLIAEKDFKKRKRKSTRDATFMGIMRKTLMQRLCSELPIPVVKTRGYITKATREKLLVLPKSHTNDALAIAQGKRGFNVGYLPEIAQIDKIYTIRPVRHHNRQLHKATILKGGIRKSNQTEKYVFGYRLFDKVQFNGQDCFIWGRRTTGIFTIKTINGKMIKDGISFKKLKPVEKSTGYLIA

SEQ ID NO: 21827 - protein, 426 aa, Parasutterella sp.; identical to SEQ ID NO: 3045

SEQ ID NO: 21828 - protein, 469 aa, Desulfobacter sp.; identical to SEQ ID NO: 2403

SEQ ID NO: 21829 - protein, 423 aa, Arthrospira sp.; identical to SEQ ID NO: 12407

SEQ ID NO: 21830 - protein, 514 aa, unidentified; identical to SEQ ID NO: 9930

SEQ ID NO: 21831 - protein, 414 aa, unidentified; identical to SEQ ID NO: 4924

SEQ ID NO: 21832 - protein, 427 aa, Phocaeicola sp.
LRVFVRNKRGKPLMPCSPAKARLLLKEKKAIVVRRTPFTIQLTIATGETKQPVSLGVDAGYKHVGLSASTEKAELYASEVELRQDITDLLSARRALRQSRRNRKTRYRAPRFDNRIRTKRKGWLAPSVENRINAHLSRIETVLRLLPVTKITVETASFDLQLLKNPDISGKEYQEGEQLGFWNIREYVLCRDGHVCQHCYGRSKDPVLNVHHLKSRRTGGDSPGNLITLCETCHKALHRGEITLKAKRGQSFRAEAFMGIMRWEVLNRLKASHPELEVNNTYGYRTKHARIANGIAKSHCADAFCIAGNLGAERLGEFFFQKQTRRNNRQIHKLSILKGGIRKRNQAPFEVNGFRLFDKVACQGEEGFIFGRRSSGFFDVRKLDGTRISAGISCKKLHLLEKRRTYLTEIRKEEALPPLPEGRGLRA

SEQ ID NO: 21833 - protein, 396 aa, unidentified
VVRRTPFTIQLTIATGEAKQPVSLGVDAGYKHVGLSASTEKAELYASEVELRQDVSDLLSARRALRQSRRSRNTRYRAPRFDIRIRTKRKGWLAPTVENRINVHLSRIETVLRLLPVTKITVETASFDTQLLKNPDIAGKEYQEGEQLSFWNVREYVLFRDGHVCQHCHGRSKDPVLNVHHLESRRTGGDSPGNLITLCETCHKALHRGEIKLKAKRGRSFRAETFMGIMRWGVLNRLKASHPKLEVHNTYGYRTKHARIANGIAKSHCADAFCIAGNFGAKRLGEFFFQKQTRRNNRQIHKLSILKGGIRKRNQAPFEVKGFRLFDKVACQGEEGFIFGRRSTGYFDVRKLDGTCISAGISYKKLHLLEKRRTYLTEIRKEEALPPPPEGRGLRA

SEQ ID NO: 21834 - protein, 414 aa, unidentified
MPCSPAKARLLLKEKKAIVVRRTPFTIQLTIATGESEQPVSLGVDAGYKHVGLSASTEKAELYASEVELRKDITDLLSARRALRQSRRNRKTRYRAPRFDNRIRTKRKGWLAPSVENRINAHLSRIEAVLRLLPITKITVETASFDMQRLKNPDISGKEYQEGEQLGFWNVREYVLFRDGHVCRHCHGRSKDPELNVHHLESRRTGSDSPDNLITLCETCHKALHRGEITLKAKRGQSFRAQAFMGIMRREVLNRLKASYPELKVHETYGYLTKHARIANGIVKSHGADAFCIAGNLGAERLGEFFFQKQTRRNNRQIHKLSILKGGIRKRNQAPFEAKGFRLFDKVACQGEEGFIFGRRSSGSFDVRKLDGTRISAGISCKKLRLLEKRRTYLTEIRKEEALPPLPEGRGLRA

SEQ ID NO: 21835 - protein, 428 aa, Moorena sp.
MQNYVLVIDTDKQPLNPISPKKARRLLDKGKAAVFRMYPFTIILKAAIANPTISPCQIKIDPGSKVTGFALVQDDQVIWGMELEHRGGLIKKKLESRSGVRGGRRNRNTRYRKPRFLNRKRPEGWIPPSLEHRVLTIETWVRRLTKFCPVNEIWIEIVKFDTQKMQDPEINGVEYQQGELAGYEVREYLLEKWGRECAYCGKQNIPLQIEHIHPKSKGGSDSAKPTLRERVSNLCLACEKCNQRKGNRPIEEFLKKKPDLLQKIKNKALSPLRDAAAVNTTRNKVVKVLKEIKPVLTGTGAQTKYNRTKLGLPKQHWIDAACVGDVEALVLRTYQPLVVTCKGQGGRQKAALNKYGYPIRHNPLKPIKGWSSGDIAKNLLTGEFGRVNPRSKSNSFNYTVPGKKAISLHVKNLLRVHRKDGYTYGFSR

SEQ ID NO: 21836 - protein, 424 aa, unidentified
MVHVISKDGNPLMSCCNVIARLLLKQGKAQVKKREPFTIKLNYETTNYLQNLTLGVDTGSRTIGTAVSNDNGDILYMSEVVVRNDITEKMTQRAKYRRNRRNRKTRYRKARWLNRANSIKNDRFSPTMRSKLYSHVKEIECIKSILPITQMVFETGQFDTHLMKNPSLANPRIRRWGYQKGPNYGYENTKAMVLNRDNYTCQCCKGKHKDSKLEIHHIVFRSKGGSDEASNLITLCHTCHKDLHSGKINPKLKGRIKGNLKFATQMNTIRKQLFRLYPNAIETFGYITKANRLQLGVNKEHYYDACTIATQGNRFTIKSNLYKKKCISDGDFQQTKGICSKQPIVTNKIHGFRKFDKVRYLGKNYFIKGRMSTGYAVLMDINGKKADFSNMPKGFKTPKMANFKRIEARTTWMTTTVVLTSNIA

SEQ ID NO: 21837 - protein, 472 aa, unidentified; identical to SEQ ID NO: 8020

SEQ ID NO: 21838 - protein, 297 aa, unidentified
QEHITAIRRVCGILPVSKVVVETAEFDLQLLKAIADGKPVPQGEDYQKGEMYGHYNVRQYVLWRDNYTCQCCGTHPSKKKEVRLHVHHLESRKVGGDAPDNQVTLCESCHEKLHKGLIAEKDFKKRKRKSTRDATFMGIMRKTLMQRLCSELPIPVIETRGYITKATREKLLVLPKSHTNDALAIAQGKRGFNVGYLPEIAQIDKIYTIRPVRHHNRQLHKATILKGGIRKSNQTEKYVFGYCLFDKVQFNGQDCFIWGRRTTGIFTIKTINGKMIKDGISFKKLKPVEKSTGYLIA

SEQ ID NO: 21839 - protein, 420 aa, unidentified; identical to SEQ ID NO: 3504

SEQ ID NO: 21840 - protein, 426 aa, unidentified; identical to SEQ ID NO: 3614

SEQ ID NO: 21841 - protein, 518 aa, unidentified; identical to SEQ ID NO: 3878

SEQ ID NO: 21842 - protein, 441 aa, unidentified; identical to SEQ ID NO: 17939

SEQ ID NO: 21843 - protein, 405 aa, unidentified
MENRIEYCFVVDKNNRPLTPTKVNKGWYLVRKSRAKLKSKYPMVIQLEKEVKSDEDDESHIVCGIDDGSAHVGLAIVQKCPTKNKVVFKGTIEQRQDVKHLMDVRRGHRRYHRYHKRYRQARFNNRSSSKRTCRLAPSIKQKKDAILRVLYQLNKWVNIQEYHLEDVCIDIRALTDDYKPYRWQYQKSNRLDENLRKATILRDECRCQECGKSNCVLEVHHIRARKYGGADTIGNLITLCSGCHQKTEGRERDFEDRYFNMIKSKPKRFDYAMHVMQGKTYLREKISELGSLHLTNGGETANKRIEWNMEKSHGNDAICVTDCIPDNCDVKEWIIKPMRRKSKAKTNNLLGIRHRDLVSYTYKNGETHTGYVTALYPEQLVLNFQSKTKHCKKVNARKCRLLCKF

SEQ ID NO: 21844 - protein, 447 aa, unidentified; identical to SEQ ID NO: 8397

SEQ ID NO: 21845 - protein, 438 aa, Clostridium sp.; identical to SEQ ID NO: 4933

SEQ ID NO: 21846 - protein, 426 aa, unidentified
MVYVQDINGKPLMPTTRHGKVRRLLKENKAVVVNLCPFTIKLMYVTSDYKQEIVLGVDAGTKHVGLSATTKSKELYSSEVILRNDIVDLLSTRRELRRARRNRLRYRKPRFNNRIKSKRPGWIAPSVKYKIDAHIRVVENVCSILPISRIVIEVAQFDTQKIKNPNISGKEYQEGDQLGFWNTREYVLARDGHKCQYCKGKSKDKILNVHHIESRKTGGDSPSNLITLCETCHKEYHKGNIDLKIRRGKSLCDAAVMGIMKWRLYEELKSKYDNISMTFGYVTKYNRINHDIEKSHVSDAFVISKNFNAIRLGYYYKVRLVRRHNRQIHKQKIQKGGIKRLNQSPFEVFGFRLFDRVMFENSYYFIFGRRKTGSFDIRYIDGKNQKNVTYKKLKLSRCKRFMIQMELNKKTRTCFENEGNSDRDAA

SEQ ID NO: 21847 - protein, 391 aa, Methanobrevibacter sp.; identical to SEQ ID NO: 13532

SEQ ID NO: 21848 - protein, 417 aa, unidentified
  REGION 1..417: note = IscB polypeptide
MEVYVLNKEGQPLMPTRPVIARLLLKEGKAKCIRRTPFTIKLLVDTTEYKQEVVAGMDTGSKTIGCAAIANGKVVYQSEVQIRQDVSKKMEQRKMYRRNRRGRKTRYRKARWQNRASMREEGRLAPSIKSKVDSHLREKKFVESILPVSTFKVETASFDIHKISNPDVGKWQYQKGQQKDFYNVKAYVLHRDGYQCQKCKTKKGKLHVHHVVFKSNGGTNSPDNLIVLCSDCHDKLHKGEFEIKGTRSKTKHATEVGIVKSQLKKQFGNFEETFGYETKYKREQILGLPKTHYFDAVAICCEESEIVELSDSVHFKKHVAKGDYQQTKGSRSEKKIPTGKLFGLRKFDYIKTPNGIGFVKGKRSTGFFAISDLEGKIINPSVNVKKNCKRLSARTTTLTERRQAHSSAGQARAVSCA

SEQ ID NO: 21849 - protein, 264 aa, unidentified; identical to SEQ ID NO: 20057

SEQ ID NO: 21850 - protein, 420 aa, unidentified; identical to SEQ ID NO: 4570

SEQ ID NO: 21851 - protein, 432 aa, Lactobacillus sp.; identical to SEQ ID NO: 6011

SEQ ID NO: 21852 - protein, 363 aa, unidentified
LSKVKTMRVFVFNMRGRPLMPCSQRKARLLLRENKAKIYKYHPFTIQLTYTTGETKQDCHIGIDTGSKYIGAAVRSEDKVFWKGEIELRQDIRSNLDTKRIYRRSRRNRKTRYRKPRFLNRKRRDEWLPPSLQSRINHTFHWIDTLSSLVPNPILHIEVGKFDVAKMINPEIHGVDYQHGQTYGFFDERYFVFARDNYTCQCCGKSKNKILNTHHIIYRSNGGTNRVDNLITVCTDCHTSQNHRKGGIFYQWQEQHKKVKQYKEPPFMNTLRKRIFVAYPDAEITYGSETTPKRKAMKLDKTHYNDAIVISGINEIKENPEEWLLIKQFRKKKRSLHEATARKGRKKPNRNQTRNSKNTPYYK

SEQ ID NO: 21853 - protein, 442 aa, unidentified; identical to SEQ ID NO: 2807

SEQ ID NO: 21854 - protein, 431 aa, unidentified
MDAWDIIVVLNKRGKPLMPCSPAKARLLLKEKKAIVKRRTPFTIQLTIATGETKQPVSLGVDAGYKHVGLSASTEKAELYASEVELRQDITDLLSARRALRQSRRNRKTRYRAPRFDNRIRTKRKGWLAPSVENRINAHLSRIKAVLRLLPITKITVETASFDMQRLKNPDISGKEYQEGEQLGFWNVREYVLFRDGHVCRHCHGRSKDPVLNVHHLESRRPGSDSPDNLITLCVTCHKALHRGEITLKAKRGQSFRAQAFMGIMRREVLNRLKASYPELKVHETYGYLTKHARIANGIVKSHGADAFCIAGNLGAERLGEFFFQKQTRRNNRQIHKLSILKGGIRKRNQAPFEAKGFRLFDKVACQGEEGFIFGRRSSGSFDVRKLDGTRISAGISCKKLRLLEKRRTYLTEIRKEEALPPLPEGRGLRA

SEQ ID NO: 21855 - protein, 502 aa, unidentified
MLPQSAALEERDADTARERHETVPLPAGKPPKLPSHTVEGSGPDGPVTGPVRDERKEKKMAVFVLDRRKKPLMPCSEKRARLLLERGRARVHRLVPFTIRLVDRTQEESALQPLRVKLDPGSKTTGIAVVREAESADEETGEIQRQVHVLWLAQLVHRGQQISEALAARRAFRRRRRSANLRYRAARFLNRSKPKGWLAPSLRHRVETTLSWVRRLQRLAPISGISQELVRFDPQALENPEISGIEYQQGTLAGYEVREYLLEKWGRQCAYCGATDVPLQIEHIHPKARGGSDRVSNLTLACAPCNHAKGAQDVRVFLAKDPQRLARILEQAKRPLHDAAAVNSTRWSLFEALKATGLPVETGSGARTKFNRVRLGLPKTHALDAVCVGVTHTVFDWDRPTLQIKATGRGSYQRTRLDRFGFPRGYLTRQKRHFGFQTGDLVRAEVPKGKKAGTYVGRVAVRASGSFNIQTREDVIQGIAHRYCTLLQRADGYGYSWIKRAT

SEQ ID NO: 21856 - protein, 417 aa, Parasutterella sp.; identical to SEQ ID NO: 15435

SEQ ID NO: 21857 - protein, 390 aa, unidentified
MRGKPLMPCSPAKARHMLKAGKAVVVRRTPFTIKLTIATGETKQDVTLGVDAGARHVGISATTEKEEVFASEVALRQDITGLLADRLAFRRARRNRKTRYRSPRFNNRVRSKHKGWLASSVENRIQAHMSRIDAVCRLLPVTKIVIEAASFDVQKIKNPTIEGTDYQQGDQLGFWNVREYVLFRDGHVCQHCHGRSRDKILNVHHLESRKTGGDAPNNLITLCETCHKAYHAGKIKLKVKRGQSFRAEAFMGIMRWTLLDRVRKTHPKLPVENTYGYLTKHKRIALGLPKTHCADAFCIAGNLKALRRGDFLFQQQTRKHNRQIHRCSILKGGVRKLNQAPFLVKGFRLFDKVRIGGQIGFVFGRRVRGIFNIRRLDKTVIGKDINCKKN

SEQ ID NO: 21858 - protein, 502 aa, unidentified; identical to SEQ ID NO: 2616

SEQ ID NO: 21859 - protein, 420 aa, unidentified; identical to SEQ ID NO: 6017

SEQ ID NO: 21860 - protein, 406 aa, unidentified
LRVFVLNKRGKPLMPCSPAKARLLLKEKKAIVKRRTPFTIQLTIATGETKQPVGLGVDAGYKHVGLSASTDKAELYASQVELRQDITDLLSARRALRRARRNRKTRYRAPRFNNRIRTKRKGWLAPSVENRINAHLSRIEAVLRLLPVTKITVETASFDMLLLKNPDIAGKEYQEGEQLGFWNVREYVLFRDGHVCQHCYGRSKDPVLNVHHLESRRTGGDSPGNLITLCETCHEALHRGEIALKTKRGHSFRAEAFMGMMRWEVLNRLKASHSELEVNNTYGYRTKHARIVNGIDKSHCADAFCIAGNLGAERLCEFFFQKQTRRNNRQIHKLSILKGGIRKRNQAPFEIKGFRLFDKVACKGEESFIFGRRSSGYFDVRKLDGTRISAGISYKKLRLLEKRRTY

SEQ ID NO: 21861 - protein, 512 aa, unidentified
MSTVYVLNKDGKPLMPTTRGGHVRHLLKEQKARVVRTKPFTIQLLYETDDVVQLLYLGIDPGRTNIGVAVVKTDGTAVFTAHLETRNKEIPKLMKKRKESRCARRTNGRRCRRQRRAKANGTISKKCVKHDTAQNGSVSKRAKEIGVIKRHLPGCEKDVLCICIKNKEAKFSNRTRPEGWLTPTANQLLQTHINLVKKIQKFLPISDVVLEINKFAFMRLDNLNVQKWQYQQGPLYQKANLEETVSEMQEHHCLFCKKKIDHYHHVVPQHKNGSNTIDNIIGLCTQHHDLVHKDATWQKRLAKKKTGLNKKYGALSVLNQIIPALTKELSSLFPKHFFVTNGKSTYDYRAAHGVSKDHWLDAYCIACSVLPNDTCDKTINSRVPYELKQFRRHDRRALNNENMSRVYMFNGKMVATNRHKATEQTTDSLEEFRQRQPNDVCNLKVKEHHPTYRNINRNYPGSVFLVGNQVHVMQGIAGSKDGEATTYKDTNANSIAAGKCKFVAKNSGILFV

SEQ ID NO: 21862 - protein, 375 aa, unidentified
VSKRAKDIGVIKRRLPGCEKDVLCIGIKNKETKFTNRTRPEGWLTPTANQLLQTHINLVKKIQKFLPISDVVLEVNKFAFMRLDNPNIQKWQYQQGPLYKKESLESAVSEIQEHHCLFCKKPIDHYHHVVPQHKNGSNTIGNIVGLCAKHHDLVHKDSAWEKKLAQKSTGLNKKYGALGVLNQIIPTLTNELSSLFPKHSFVTNGKSTYDYRAAHGVSKDHWLDAYCIACSVLPSNVCDSNINNHMPYELKQFRRHDRRVLNNENMNRVYTLNNKAVAINRHKAKDQKTVSLEKFRKEHPDDVCKLKVKEHHPTYRNMNRNFPGSVFLVGKQIHVMQGIASSKDGKATKYNDTSATAIATGKCKFVAKNTGILFV

SEQ ID NO: 21863 - protein, 406 aa, unidentified
  REGION 1..406: note = IscB polypeptide
MLVYVLNKTGKPLMPCSPKKAKMLLKQGKAKVVNRTPFTIQLLFCGSGYKQEVILGVDAGSKMIGLSAVIEKKEVFSAEVQIRNDIVELLATRKQNRRIRRSRKVRYRQSRFLNRKRSIGWIAPSVENKISTHLRIIDKVHQILNITKIIVEVTSFDIQKIKKPTIEGVEYQQGEQLDFWNVREYVLFRDSHKCQGRKGCKNKELSVHHIESRKIGGDAPSNLITFCTKCHDDYHKGLLKLNLKRGKSFRDATFMGIMRWTLFNRLKDLYSNVSLTYGYITKNTRIVNSLPKEHRIDALCITRKPIVKRLENWLMVRQVRRHNRQIHKTKILKGGIKKLNQAPHIVKGFRLFDKVLFESSECFIFGRRSSGYFDLRTLGGVRIHASANVKNLKLVDTNKTLLWERK

SEQ ID NO: 21864 - protein, 448 aa, Deinococcus sp.; identical to SEQ ID NO: 14669

SEQ ID NO: 21865 - protein, 431 aa, unidentified
MPDKVYVISRLGHPLMPCSPAKARHLLDDKKAKVVKRTPFTIRLLYGSTKYIQPVILGVDAGSKTIGLSASTVKEELFAAEVMPRNDVVENLSTRRAFRRARRNRTTRYREPRSDNRVRSNHECWLAPSVKVKIQEHITSIKRVCTILPVSKVAIETAEFDLQLLKAIQDGKPIPEGEDYQKGEMYGSYNVRQYVLWRDNYTCTCCGVKGTDKKPVKLHVHHFESRKHGGNAPDNYGTLCEDCHKKFHLGIIIDEILKTRKRRSTRDAAFMGIMRKTLMQRLRTELSIPVAETKGYITKATREKLLVLPKSHTSDALAIAQGRHGFGIKAHTYVEPANHIYTVRPVRHHNRQLHKASILKSGIRKRNQASKYVFGFRLYDKVLYQGKACFVWGRRTSGSFLLRTIDGIKVKDGVSCRNLTLLERSSNYLIA

SEQ ID NO: 21866 - protein, 493 aa, unidentified
MAAVYVISASGKPLMPTTRCGHIRGLLNAGKARVVEREPFTIQLKYETPDVTQPLYLGIDPGRTNVGSAVVREDGECVFTAQLTTRNKDVPKLMKARKQFRMAHRRLKRRCKRQRRAKAAETLSQKGEFQRQLPGYEESILCKGIRNKEARFNNRQRPAGWLTPTANHLLLTHLNMVKKLQKLLPITDVVLEVNRFAFMAMENPSIRRWQYQQGPLYGKGSVEDAVYAQQDGHCLFCGKPIAHYHHVVPQHKNGSETLENRVGLCNEHHDLVHKDRAWDAKMKETKAGLNKKYHALSVLNQIIPALTEQLTAMFPQHAFVTTGKDTADFREDYGIAKEHHLDAYCIACSVLAEPTKVAAPTGKPHRLMQFRRHDRQVCHKENIKRVYLSEGKAVATNRHKAIEQKDDSLEEFRKTHTQQEVSALTVKDHQPVYKDMRRFMPGGVFLFNGKVHTLQRSHGRYKGMPFYYIDTDGSKNHAKGCIFLQQNCGLRWV

SEQ ID NO: 21867 - protein, 449 aa, unidentified
LATDNSPRFVGSRICFDRCENRNKEGGRTLVYVISKTGQPIMPTENHAKVRILLKSGKAKVVKRTPFTIQLTGTSKTFTQEVTLGVDAGSKHVGLSASTAKKELFSAELRPRNDVVDLMSSRRALRRSRRNRTMRYRQARFLNRVHFKHKWWLAPSVEVKIWNHIQGIRFVMKLLPVKTIRVETAEFDLQRLKALEAGEPVPVGTDYQLGEMYGQYNVRQYVLHRDGYTCQCCGAHGTDKKPVKLHVHHLETRKTGGDAPDNLITLCEDCHTGYHAGTVALPITKRRRKSTRDAAFMGIMRKTLLERLRNMFPDANICSTYGYITKYWREKKNIVKTHTSDAFVIAKNFDAERLDRSLLIVPKRQHNRQIHKCKINKGGMRKLNQTPKFVFGYQLFDRVMCMGQEGFVFARRSSGGFDIRKLSGEKIKPNINYKKLKRLESRNTLLVSY

SEQ ID NO: 21868 - protein, 424 aa, unidentified; identical to SEQ ID NO: 3351

SEQ ID NO: 21869 - protein, 442 aa, unidentified; identical to SEQ ID NO: 4522

SEQ ID NO: 21870 - protein, 419 aa, unidentified; identical to SEQ ID NO: 8011

SEQ ID NO: 21871 - protein, 507 aa, unidentified
MSEYIYVIGVDGDPQMPTKRKRHVEKLLQAGRARVFRQIPFTIQLTYENKPVLQPITIAEDPGRSNIGMAVVSLSGELLSAAVVQTRNKEIVKLMEKRKQHRRASRNGERKARQRLAKKCHTMIKAGSLMRKLPMYGKDKRVQCNVIRNTEARFCNRKREDGWLTPSAEHLVQTHINLIHKMQKFLPITDVAFEINRFAFLSLEDPSISGVDFQNGPLKGYDDLNAAIEDLQDGHCLMCNSPIEHRHHIVPRSMQGSNTIGNIAGLCCKCHERVHKDARFEDRLKKKKAGLNKRYAAVSALNQAIPFICKRLEQEFGKEHVHYCSGRDTSMVRRSFGYHKTKEEQLHEVDAWCIAVLSLRQIPEKAPEFDHVHELLQFRRQDRSRIKSQTSRAYYHEGKKIAKNRKKAEGQREDSLQEWRKQQVKRYGEEQTRKMISQLEIKKSIRRYNRLDRLMPGAVFYYQGIRYVMRGQHCEGTYLQAVGMGSKDFPAKKCKIVAHNEGLVFVS

SEQ ID NO: 21872 - protein, 408 aa, unidentified
LMPCSPGRARLLLKQQKACVVKRTPFTIKLLYGSAGYKQPVALGIDAGSKHVGLSASTEKRELYREEFTPRNDVVELLSTRRQNRRSRRNRKTRYRAPRFDNRVHSKHKGWLAPSVEVKIQEHITVIKRICRILPITLVRVETAEFDTQRLKAMLKGKPLPVGTDYQLGEMYDEYNVRQYVLKRDNYTCQCCGAHPTEKKPIRLHVHHIESRHVGGNAPNNLITLCVACHKALHEGKITLDKGKKRGKPLRDAAFMGIMRNTLLARLKDELNIPVKQTYGYITKLLREKNKIPKSHVNDARCIAKAPNAKPCDTMLYTRALRHHNRQIHKAKILKGGIRKKNQAPYLVKGFRLWDKVRYNGEECFITGRRSSGYFALKKYDGTVISNSASYKKLMLLEAATNYITERS

SEQ ID NO: 21873 - protein, 427 aa, unidentified
VCKVFVLDTEKRHLDPIHSAQARQLLRNKKAAIYRRFPFTIILKESRPDSPVTPLRLKLDPGARTTGIALVNDTTGEVVFAAELKHRGFAIRDALTSRRQLRRGRRNRKTRYRKPRFLNRTRPLGWLAPSLQSRIENIKTWVEKLRKLAPITAISQELVKFDMQLMRNPDIEGKEYQQGTLAGYETREYLLEKWGRQCAYCGVKDVPLQIEHIHPRSKGGSNSITNLTLSCSKCNIKKGTKDIRDFLKKDPNKLQKILLQVKRPLTDAAAVNATRYALLEGLKATGLTVECGSGGLTKFNRSHQSLPKTHWIDAACVGKSTPILNIKGVKPLLITANGHGTRQMTGTDKFGFPNRHRSNKQIHFSFSTGDIVKAVVTSGKKIGEYVGRILCRATGSFDIATKLGRISGINYKYCLAIHKKDGYSYAF

SEQ ID NO: 21874 - protein, 420 aa, unidentified
MLVYVLKQNGQPFMPTSRFGKVRRLLKEGKAKVVRREPFTIKLLYEPETCVIQECYCGVDTGSKHVGVAVVGNDRVLYQSQTELRDDIKGKMDRRRAFRRNRRNRKTRYRKCRFLNRGISTKNGSLPPSVKHKVQAHIDEIEFCKKILPISDKNVILEVSQFDTTLLKNPSLISEKVKHWGYQKGFNYGHSSRRKAVLHRDNYTCQCCGKGDCRLEVHHIIFRCNGGTDDEENLITLCKDCHDGVHAGTVVLNTKPKKSKNLKHATHMSIIRSRLLKKYSEAIETFGFVTSENRNHLNLPKDHYIDACVIASGGLDFKKLDVIYYKRRVSKGEYQLTRKSCGKEFICKGKILGFKQLDKVEYFGIKCFINSRRSMGVATLVDIFENKLNFSNLPRGYRSPKMHLLRRLSSRRTVLTMSKI

SEQ ID NO: 21875 - protein, 472 aa, unidentified
VVGNRLLSIKPLINIGEGVIYSSICTGLSLQTYQKRKEVPCMVYVLDINGQPLMPTTRHGKVRRLLNSHLAKVVKRCPFTIQLLYQSTKEIQPVSLGVDAGSKHIGVVATTEKKVVYQEELSPRNDVVKLLSARRTLRRTRRNRKTRYRKPRFNNRVHSKHKGWLAPSVEVKIQEHITTIKRICQILPISEIQVETAEFDLQRLKAMEEGRTPPVGTDYQLGEQYDFYNTRQYVLHRDGYTCQCCGTHDNNIKLHVHHIESRQTGGDAPNNLIILCEHCHKALHEGKLELPKGKKRGKSYSDATFMDVMRKTLLERLKKEIDVPVEGTYGYITKYWRERAGLEKSHIHDAVCISQYPYAKPLDIYYLTKTVRHHNRQIHKSNFSKGGIRKRNQAPYLVKGFRLFDKVLYQGKEYFIFGRRATGYFDIRTLDGTKVNKGSISYKKLRIQDTAKAYLKEARAIPHMNKFTCVLA

SEQ ID NO: 21876 - protein, 420 aa, unidentified
MQYVYVLNKHGKPLMPCSPGKARLLLKQQKAHVVKRTPFTIKLLYGSAGYKQHITLGVDAGSKHVGLSASTEKLELYCEEFTPRNDVVDLLSTRRAFRRSRRNRKTRYREPRFDNRVHSKHKGWLAPSVEVKIQEHITVIKHICKILPISLVRVETAEFDTQRLKAMLAGKPLPVGTDYQLGEMYDEYNVRQYVLKRDHYTCQCCGTHNTAKKVVKLHVHHLESRKTGGNAPSNLVTLCTTCHKNLHKGRVTLDGKERGKPLRDAAFMGIMRKTLMVRLKEELPIPVQGTYGYITKMRREQNDIKKSHTNDARCISKHPLAEPCSVCYRTKAIRHHNRQTHKANFSKKGIRKRSQMPYLVEGFRLWDKVLYKGQECFVSGRRSSGSFALKKLDGTSISKGVTFKKLRLLEPATNYLIERM

SEQ ID NO: 21877 - protein, 450 aa, unidentified; identical to SEQ ID NO: 2935

SEQ ID NO: 21878 - protein, 371 aa, unidentified
MVYVQDINGKPMMPTTRHGKVRRLLKDKKAVVVNLCPFTIKLMYVTSDYKQEIVLGVDAGTKHVGLSATTKSKELYSSEVILRNDIVDLLSTRRELRRTRRNRLRYRKPRFDNRVKSKRPGWVAPSVRYKIDAHIRVIDNVCSILPISRIVIEVAQFDTQKINNPNISGKEYQEGNKLGFWNVREYVLARDGHKCQYCKGKSKSKILNVHHIESRKTGGDSPSNLITLCEICHKEYHKGNIDLKIRRGKSLRDAAVMGIMKWRLYEELKSRYDRVFIERQYLKRLIRRHNRQIHKMKILKGGKKKNNQAPFEVFGFRLFDKVLYNNKIFFVYGRRKSGSFNVRDFNGENSKDVSRKKFKLIRGKRHPIILK

SEQ ID NO: 21879 - protein, 416 aa, unidentified
MPCSPAKARHLLDAGKAKVKKRTPFTIQLVYGSSGYTQEVILGVDDGSKTIGISVSTKKEEVFAADVTPRNDVVNLLSACREFRRARRNRKTRYRKSRFDNRVRSKRKGWLAPSVEVKIQEHITAIKMVCRILPVSKVVIETAEFDLQLLKAIADGKPVPQGEDYQKGEMYGHYNVRQYVLWRDNYTCQCCGAHATKKKEVRLHVHHLESRKVGGDAPDNQVTLCESCHEKLHKGLITEGDFKKRKRRSTRDATFMGIMRKTLMQRLCSELPIPVIETRGYITKATREKLLVLPKSHTNDALAIAQGKQGFNVGYLPGILQIDKIYTIRPVRHHNRQLHKAAILKGGIRKSNQAGKYVFGYRLFDKVQFNEQDCFIWGRRTTGIFTIKTINGKMIKDGISFKKLKLVEKSTGYLIA

SEQ ID NO: 21880 - protein, 223 aa, unidentified
MVYVLDKNGQPLMPTDRHRKVRLMLQSGQAKVIKRCPFTIQLNYDSGHQTQEISLGIDAGSKHIGVSATTKIKVLYEADVELRNDIVDLLSSRRELRRGRRNRKTRYRQAKFNNRRRGNGWLAPSIRQKIGTHLTVVENICKMLPISRIMVETASFDIQKIKNPDIQGAEYQQGDQLEFWNVREYVLFRDGHICQCCKGKSKDKILNVHHIESRKTGAMPRTI

SEQ ID NO: 21881 - protein, 415 aa, unidentified; identical to SEQ ID NO: 2674

SEQ ID NO: 21882 - protein, 420 aa, unidentified; identical to SEQ ID NO: 7360

SEQ ID NO: 21883 - protein, 420 aa, unidentified
MLVYVLKQNGQPFMPTARFGKIRRLLKTKKAKVVRREPFTIKLLYEPETDVVQECYCGVDTGSRHIGVAVVSNDKVLYQSQTELRNDIKRKMDARRAYRRNRRQRKTRYRKPRFLNRSNSTKSNRLPPSVKHKVQAHIDEIEFCKKILPVSDLIVEVSQFDTALMKDPSLISEKVKHWGYQQGFNYSYSSRREAILHRDNYTCQCCGKKNCRLEVHHVKFRSNGGTDDEENLLTLCEDCHKGVHAGTIVLNKKPKKSKNLKYATHMSIIRSYLLKKYPNAIETFGFVTSENRNHLKLKKDHYIDACVVASGGLEFKELDVIYRKRRVSVQDRVLTKGVRGEQKLPTGKIFGFKKFDKVEYLGETCFIKGRRSSGAFVLMDIDNNSIDFRDRGGEQNPSYKSIKRLNTRRNILCISRRIER

SEQ ID NO: 21884 - protein, 453 aa, unidentified
MTAVYVISADGQKLMPTLRNGKVRHLLKEGKAKICKYRPFTIQLTYDTPNQVQPIEIGMDSGYQHIGLSVKTEKKEIFSAEFTLLTDEKKRHDDCRKYRRTRRNRLRYRKPRWLNRTKTIPEGWLAPSLLHKAEAHIKLVKDICSVAPITNVTTEAGEFDPALLKAMHEGKEPPQGTDYQQGPLYFADSLRKAVFQRDNYTCKICHKSALKDKNVILKIHHALYWKNRHGNNLSELITVCDRCYTSANHAPNGKLYGLEPKVARLESAAYMNIVRWYIINTLKKELPNIQVNFCYGALTARKRKDLELEKSHTNDAFCIGNFLPSLRSVATEYFKKKRRNSRILEKFYDAKYIDIRDGKIKKGAELSTGRTNRSIPRNNENNLRKFRSEKKSKGRRQIRKTRYSFQQNDFVFYKKRLYKVIGMQNLGKYISLQGFKPVPISQVQLYKHANAWT

SEQ ID NO: 21885 - protein, 325 aa, unidentified
NENIKVWEYGKGKLYGYDSPEEYIHDVQNGKCLVCGKPHIDYLHHIIPRSKGGSDKVSNIAGLCYDCHYGPMGVHNCQNTQDRLPELKSEANKQYKVSLLNSVMPVLIEEMDKFCKANSIMFSICEGHDTAKVRDMYDLQKDHCIDGFAISLVDRNVKSVDVMPDRIYQKQRYKKKSKNIIQKRNCREYYDDKKLVAVNRHKGTDQKADSLEEYMNTYAETHTTDECKKHFDSLVVKPARRTYTFHKEWRICPFHIGDKVRYEKKNKIKGNTKVDTFICEGIRFVKDENKAEVKHNKTKSKKMKFCRVLESGCTPYVDYRKLALM

SEQ ID NO: 21886 - protein, 444 aa, unidentified; identical to SEQ ID NO: 13472

SEQ ID NO: 21887 - protein, 509 aa, unidentified; identical to SEQ ID NO: 9060

SEQ ID NO: 21888 - protein, 415 aa, unidentified; identical to SEQ ID NO: 11876

SEQ ID NO: 21889 - protein, 577 aa, unidentified
  source 1..577: note = Candidatus Poribacteria bacterium
MSKVSVLDTHKNVLEPCHPAVARCLLRKGEAAVFKRYPFTIILKREVPSPKTTDHTLSIDPGSKCTGMAITDSENNIIVCFELHHRGAAIKKGLSNRAGYRRSRRTRKLRHRPARWQNRSRKAPILTANGWQYQSFGQSSEGWIAPSLMSRVFNIYTWVSRLSKIYPITQLAVEHVKFDTQLMENPEISGVEYQRGTLFETEVWEYLLEKFKRKCYYCGAKNVPLEKEHILPKAKGGTNRVSNLTTSCRECNIKKGNRHPDEIQGDFGKRVQSALRAAKKPLKDAQAVNTIRWKIVETLKATGLPVTYGTGGKTKYNQTKAGLPKTHYYDAACIVGVPNAIECDSVLAIHAVGYGHRQDLGDFQTKAGLKDPYPKFKKPYKRIGHCEGIQRLDILEMKGKIGYLSDFRKTDEGKPQKLRIKHTWDGDGRIGGNITEVKRIQKRDGYAYQIIPIQKTKPKKDRVAPVITGRQLTMSWGDEAPDKGKQPFNTASIAEKNTKTGTLRVMNGTKGSGRTAPFTKPEKPCSALRFLFYHNAEPRIKRRFANGSQPIRPNLARRPSSHQHQVFLKRGETEIPK

SEQ ID NO: 21890 - protein, 413 aa, unidentified; identical to SEQ ID NO: 3023

SEQ ID NO: 21891 - protein, 417 aa, unidentified
MPCSPAKARLLLKERKAIVKRRTPFTIQLTIATGEAKQPVTLGVDSGYKHIGLSATTEKAELYASEVELRQDITDLLSARLALRRSRRSRKTRYRVPRFDNRVASKRKGWLAPSVENRITAHMSRVEAVMRVLPVTAITVETAAFDTQLLKNPDITGAAYQQGEQLGFWNVREYVLFRDGHVCQHCRGKSKDPILNVHHIESRRTGGDAPNNLITLCETCHKAFHRGEIKLKVRRGKSFKAETFMGIMRRTLFERLEKAHPELNVRNTYGYLTKHKRISYGIAKSHCADAYCIADNLGAKRLEGFFFQKQTRKHNRQIHKLLILKGGLKKKNQAPYEVKGFRLFDKVICKGEEAFIFGRRTSGSFDVRRLDGTRISAGINYKKLRLLEPRTTYLTEFRKEAALPPLHKCRGFCAEFL

SEQ ID NO: 21892 - protein, 443 aa, Anoxybacillus sp.; identical to SEQ ID NO: 4769

SEQ ID NO: 21893 - protein, 490 aa, unidentified
MNYVYVLDPDGKPMMPTTRFGKVRRMLRSGEAKAVTTRPFTIRLTYWPKTHETQPVVAGFDPGRTNICLCTVRDDGRPLYLAHCETRNKEIKNLMSDRKGHRQASRRGERLARKRIAKRLGTTVKGLLRRILPGCKEPLCLKDIINTEARFNNRLRPKGWLTPTARHLLLTHVNLLKQMQKILPVSGVVVEINRFAFMQLDNPGVKKKDIDFQHGQLFGFSGVREAVRLQQNGLCLCCKKREIEHYHHIIPRSKRGSDTLPNIAGLCKACHEKVHTSEEAAKKLASRKAGLTKKYGGTSVLNQIIPKLFDTLKEMFPGHTYATTGQTTKSFREEHGLLKDHMVDAYSIACSILENPVVSIPDAHYEIHQFRRHDRALIHHQTERTYYMDGKAVCKNRHKRFEQKGDSLEEFAKVHPDLVSKLTVKKSRRYYNDPGRILPGAIFIYEGKQYVLTGRSSGGKQYRAFGYGTRNFQAGKSKIVWQNTGLVYVG

SEQ ID NO: 21894 - protein, 435 aa, unidentified; identical to SEQ ID NO: 21738

SEQ ID NO: 21895 - protein, 421 aa, unidentified
MVYILNKHNEPMMPCSERKARLLLKQGRAVIYRKDVFTIKLINGSYGYKQHITLGVDCGSKHIGVSATTDKQELFSANAELRNDVVKLLSDRRMLRRSRRFRKTRYRKPRFNNRIVKNGWIAPSIKQKIQSHFNLVGFLHKLLPISKIVIETASFDIQKINNPSISGSEYQQGEQLDFFNVREYVLFRDNHICQHCKGKSKDKVLNVHHIESRKTGGDSPNNLITLCETCHKAYHRGEFELNVKRGKSFRDSAFMGIMRWKLYDELKLRYDNVSMTFGYITKYKRIKLGLDKEHYNDAYCICGNLAAKMLSTHHFIRFIPRHSRVLHMHKFSKGGVRRSASASYWLNGGKPSKSGAMFTMFDKVKFNGIVCFISGSSNGYAALRDINWNKIDGCKTVVTVNKLLLISRKYGGFIVEKKIII

SEQ ID NO: 21896 - protein, 548 aa, unidentified
LFLQIPQAFGCLLRLSIFPVDSSAQVALSRTIPLTANTQPRETQPPVSAGETYSKRRVAYMPTVYVLNKDGKPLMPTTRCMHVRHLLKNGKARVVKSKPFTIQLLYETDDVVQPLYLGIDPGRTNIGVAVVKADGAAVFTAHLETRNKEVPKLMKKRKESRCARRTNGRRCRRQRRAKTNGTISKKCVKQTTAQNGSVSKRAKEIGVIKRHLPGCEKDVLCIGIKNKEAKFTNRARPEGWLTPTANQLLQTHINLVKKIQKFLPISDVVLEVNKFAFMQLDNPNIQKWQYQQGPLYQKGSLENAVSEMQEHHCLFCEKPIEHYHHVVPKSENGSNTIANIVGLCTEHHNLVHKDATWQKKLAKEKVGLVKKYSALSVLNQIISALTKEMNSLFPKHFFVTNGKSTYDYRTAHGVSKDHWLDAYCIACSVLPNDVCDSNINSHVPYELKQFRRHDRRVLHKANMSRVYTLNGKTVATNRHKAIKQTTDSLEEFRQSHPGDVCKLKVKEHHPAYRNLNRNYPGSVFLVDGQVHVMQGVSGSHNGKADGYY

SEQ ID NO: 21897 - protein, 423 aa, unidentified
LRVFVLNKRGKPLMPCSPAKARHLLKEKKAIVVRRTPFTIQLTIATGESKQPVSLGVDAGYKYVGLSASTEKAELYASEVELRQGITDLLSARRALRRARRNRKTRYRAPRFDNRIRTKRKGWLAPSVENRINAHLSRIETVLRMLPVTKITVETASFDMQLLKDPDISGKEYQEGEQLGFWNVREYVLFRDGHVCQHCHGRSKDPVLNVHHLESRRTGGDSPGNLITLCETCHKALHRGEITLKAKRGQSFRAETFMGIMRREVLDRLKASHPKLEVQNTYGYRTKHARISNGIAKSHCADAFCIAGNLGAKRLGEFLFQKQTRRNNRQIHKLSILKGSLRKRNQAPFEVKGFRLFDKVAYQGEEGFIFGRRSSGFFDIRRLDGTRISAGINYKKLRLLEKRRTYLTEIRKEEARRPLPEGR

SEQ ID NO: 21898 - protein, 443 aa, Ectothiorhodospira sp.; identical to SEQ ID NO: 18021

SEQ ID NO: 21899 - protein, 434 aa, unidentified
MQNFVFQLDSNKQPLDMVHPAKARKLQSQGKAANFRMYPYTIIRNVSFGNNPNTKSYTLKIDPGATWTGFAIQCGEEIIFRMELKHRGGLIKKSLEQRAGFRKGRRSRNLRYRKKRFNRKKPEGRLAPSLRHRLQTVETWMKKFLKLCPITCIEIEQVRFDLQKLENPEISGVQYQRGELQGYEIREYLLEKWGRQCVYCEKQDTPLQIEHIKPKSKGGSNRIGNLTLSCPECNQNKGNQDVEDFLSGKPDLLKRVLAEAPKPLDSGSAVNSTRYAIVEMAKNLCDHVKCWTGGRTKYNRVNQELPKSHSIDAACVGESGSKIKLLVNQPLIVESKGHGTKQARRANKKGFPALNKDNQPIKPKTRYTHCVAGDMIKFRLDKDRKTVKAGIYKGRVKTPTPKGFEVKINDCRVSQKMNYLIRFMHRNDGYNYSF

SEQ ID NO: 21900 - protein, 436 aa, unidentified
LLMVAVVDLFGKPLMPTNEYRARKLLKQKKAKIFGYRPFTIQLTERKSAEIQPIELCMDTGYIHIGISAKSERHEYLGMQIDTLTDEKLKRDDKRQYRRQRRNRKRYRAPRFDNRRRKEGWIAPSLEHKKEIHIDAIQRICKVMPITDITLEIGNFDTHVLKAVEEGKPLPQGSDYQHGERYGIATLREAVFLRDGYKCQCCEKSVKDGAILHVHHIKYRSQGGTNRMSNLITVCDKCHTPKNHKPGGKLWNWKPKLAEFKGASYMTSIRWTLYNEVTALLPNSSVHITYGAKTKESRRKLDIKKSHVNDAYVMGLFCPKHRTKPVYFKKKRRNNRVLEKFYDAKYIDSRDGKKQSGQELFNGRINRNHRKDSENLHLYRKQKVTKGKRSIRNKHYPIQPHDILLYQKKKYENAGCHNNGSRGILLPEKKSVALKQ

SEQ ID NO: 21901 - protein, 447 aa, unidentified; identical to SEQ ID NO: 8397

SEQ ID NO: 21902 - protein, 431 aa, unidentified; identical to SEQ ID NO: 2746

SEQ ID NO: 21903 - protein, 430 aa, unidentified
MPKVYVLNRHGRPLMPCTPAKARHLLDAGKAKVRHRTPFTIQLLYGSTGYTQEVILGVDAGSKTIGLSAATETEELFSAEVKPRNDVVELMSARRQFRRARRNRTTRYRKPRFDNRVRSKHKGWLAPSVEVKIQEHMTAIRRACAILPVSKVVVETAEFDLQLLKAVAEGKPVPQGEDYQKGEMYGHYNVRQYVLWRDSYTCCICGVHGSVRKGVPLHVHHLESRRVGGDAPDNLVTLCTACHDKLHKGIIMAADIKKRKRRSTRDATFMGIMRMTLLRRLREQLPVPVVETRGYITKATRENLLVLPKSHANDALAIAHGPQGFRAEYLPNIRQADRLYTIRPVRHHNRQLHKATILKGGVRKTNQAEKYICGFRLYDKVLYNGIECFVWGRRTSGSFLLRQLNGEKVKDGVSYKHLKLLERSQSYLVA

SEQ ID NO: 21904 - protein, 419 aa, Geobacillus sp.; identical to SEQ ID NO: 3993

SEQ ID NO: 21905 - protein, 424 aa, unidentified; identical to SEQ ID NO: 8578

SEQ ID NO: 21906 - protein, 414 aa, Eubacterium sp.; identical to SEQ ID NO: 5563
  source 1..414: note = isolate UBA3690

SEQ ID NO: 21907 - protein, 455 aa, unidentified
MVFVLDRHHKPLMPCHPARARRLLGKGRARIHKLYPFTIRLVDRELKDSTVQPVVLKLDPGSKETGMALVREDETKTHHALYFVNLKHRGSEIKQSLLQRRNFRRSRRSRNLHYRAPRFLNRTRPQGWLAPSLRHRVDTTLAWVERLRRLAPVATLEMELVKFDTQKMQNPEIDGVAYQQGKLAGFEVREYLLEKFGRKCIYCGAEGVPLNIDHIVPKSAGGSNRVSNLVLACVDCNQKKNNLPFEVFLKGDKAKINRIRSQLKTPLKDAASVNTTRWQLFEALKLTGLSLTTATGARTKYNRHQFGVPKEHWLDALCVGKVAAIRGWQTLDVLVVKCTGRGAYKRTRLTKDGFPRGYLTRTKRFFGFGTDDMVVATVFAGKKKGSYKGRVAVRKSGSFAIQTASRKVDGISYRYCRLLSRADGYGYSWHSSKSLINSTKETALLPRINTQVSAP

SEQ ID NO: 21908 - protein, 340 aa, unidentified
DLLSARRTLRQSRRNRKTRYRAPRFDNRIRTKRKGWLAPSVENRIDAHLSRIEAVLRLLPVTKITVETASFDLQLLKNPDISGKEYQEGEQLGFWNIREYVLCRDGHVCQHCYGRSKDPVLNVHHLESRRTGGDSPDNLLTLCETCHKALHRGEITLKAKRGQSFRAETFMGIMRWEVLNRLKASHSELKVHNTYGYLTKHARIENGIAKSHGADAFCIAGNLGAERLGEFFFQKQTRRNNRQIHKLSILKGGIRKRNQAPFEVKGFRLFDKVACQGEEGFIFGRRSSGFFDVRKLDGTRISAGISYKKLHLLEKRQTYLMEIRKEEAFPPLPEGRGLRA

SEQ ID NO: 21909 - protein, 437 aa, unidentified
  source 1..437: note = Bacterium sp.
MRVYVRNKNGNPLMPCKPAKARHLLRDGKAKVVNRCPFTIKLEWDCEENVQEVTVGIDKGSSVTGFSCVRFAKQRTGAFAGSRLGNGKILMSGEIHHRTDIKDKMDARRANRRNRRNRKWYRPKRFNNRASSRRSGRLPPSIKANVEEVIRVVGQLPLPISHIIVEDVAVDVRRLSNPDVKGSEYQQSNRLDENLRLACLTRDDFTCQKCNKKETLLEAHHIVWTTKGGKDSIYNLITLCESCHDKVHRKGESGKVKIKGGKVVKGMAGFSDKVVQRTMQGKTLMYQELEKIASFETVYGYQTSAYRKSLSLPKTHDIDALCVATVLTGEVITQDPSQAQDENFYTIKFRQRQTRRQFHDLPQKGVGRVRYQVNAELEGFRKGDIVRVKEKWIKQINSIYSSGYLAFARVKGEPSAAKPKDCQLLQKGQTMIWEKVV

SEQ ID NO: 21910 - protein, 427 aa, Eubacterium sp.; identical to SEQ ID NO: 3021

SEQ ID NO: 21911 - protein, 512 aa, unidentified
MSTVYVLNKDGKPLMPTTRCGHVRHLLKEQKARVVTSKPFTIQLLYETDDVVQPLYLGIDPGRTNIGVAVVKADGTAVFTAHLETRNKEIPKLMKKRKDSRRARRTNGRRCRRQRRAKANGTISKKCVKQTTAQNGSVSKRAKEIGVIKRHLPGCEKDVLCIGIKNKEAKFSNRTKPEGWLTPTANQLLQTHINLVKKIRKFLPISDVVLEINKFAFMQLDNPNVQKWQYQQGPLYQKANLEEAVSEMQEHHCLFCKKPIAHYHHVVPQSENGSNTIGNIVGLCTKHHDLVHKDTAWQKKLTKKKTGLNKKYGALSVLNQIIPALTKELSSLFPKHFFATNGKSTYDYRAAHGVRKDHWLDAYCIACSVLPNDVCDKNINSRVLYELKQFRRHDRRALNNENMSRVYTLNENVVATNRHKATKQTTDSLEEFRQNHPDDACKLKVKEHHPTYRNMSRNYPGSVFLVGNQVHVMQGVAGSKDGKATTYKDTNANSIAAGKCKFVAKNSGILFV

SEQ ID NO: 21912 - protein, 408 aa, unidentified
MVYVQDIDGKPMMPTTRHGKVRRLLKANKATVVNLCPFTIRLTYATSGYKQEIVLGVDAGTKHVGLSATTKSKELYSSEVILRSDIVELLSTRRELRRTRRNRLRYRKPRFGNRVKSKHHGWVAPSVRHKVDAHIRVIDNICSTLPISRIIVEIAQFDTQKIKNPDISGNEYQEGDQLGFWNVREYVLARDGHKCQHCKGKSKDPILNVHHIESRKTGGDSPSNLITLCETCHKEYHKGNIDLKVKRGKSLRDAAVMGIMKWKLYEELKSRYPNVSMTFGYITKYNRIKYGIEKYHISDAFVISKNFNALRLEYYYKVRLVRRHNRQIHKQKVLKGGAKKPNQSPFEVFGFRLFDRVMFEGNYYFIFGRRKSGSFNIRDINGGNQRNVTYKKLKLSIGKRFMIQKEMN

SEQ ID NO: 21913 - protein, 445 aa, Allochromatium sp.; identical to SEQ ID NO: 21220

SEQ ID NO: 21914 - protein, 408 aa, unidentified
MVYVQDIDGKPMMPTTRYGKVRRLLKNKKAVVVNLCPFTIRLTYVTSDYKQEIVLGVDAGTKHVGLSATTKSKELYSSEVILRNDIVDLLSTRRELRRARRNRLRYRKPRFDNRIKSKRPGWIAPSVKYKIDAHIRVVENVCSILPISRIVIEVAQFDTQKIKNPNISGKEYQEGDQLGFWNTREYVLARDGHKCQYCKGKSKDKILNVHHIESRKTGGDSPSNLITLCETCHKEYHKGNIDLKIKRGKSLRDAAVMGIMKWKLYEELKSRYPNVSMTFGYITKYNRIKYGIEKYHISDAFVISKNFNALRLEYHYKVRLVRRHNRQIHKQKVLKGGAKKPNQSPFEVFGFRLFDRVMFEGNYYFIFGRRKSGSFNIRDINGGNQRNVTYKKLKLSIGKRFMIQKEMN

SEQ ID NO: 21915 - protein, 414 aa, unidentified; identical to SEQ ID NO: 2588

SEQ ID NO: 21916 - protein, 440 aa, unidentified
MSTGLRAEQAEPAGIRKGDTLKVFVLNMRGKPLMPCSPAKARHMLKAGKAVVLRRTPFTISLTVATGETKQEVTLGVDAGAEHVGISATTEKEEVFASEVELRQDIKGLLADRLEFRRARRNRKTRYRAPRFDNRVRSKHKGWLAPSVENRIQAHISRIEAICRVLPITKIVSETASFDIQKIKNPEVEGTDYLQGDQLGFWNVREYVLFRDGHVCRHCRGRSKDPFLNVHHLESRKTGGDAPNNLITLCETCHKAYHAGKIKLKARRGTPFRAEAFMGIMRWTLLERVRKAHLELPVENTYGYLTKHKHIVLGLPKTHCADAFCIAGNLSALRRGEFLYQRQTRKHNRQIHKCSILKGGVRKLHQAPFLVKGFRLFDKVKCKGRIGIIFGRRSSGYFDVRTLDGVRLSAGISSKKLMLLEKQTTFLTQLRKEVGASSPS

SEQ ID NO: 21917 - protein, 450 aa, unidentified; identical to SEQ ID NO: 5360

SEQ ID NO: 21918 - protein, 411 aa, unidentified; identical to SEQ ID NO: 3917

SEQ ID NO: 21919 - protein, 431 aa, unidentified; identical to SEQ ID NO: 12300

SEQ ID NO: 21920 - protein, 456 aa, unidentified
MAVFVLDRHQKPLMPCSEKRARKLLERGRARVHRLMPFSIRLVDREVRDAVLQPLKIKLDPGSKTTGVALVRESEAIDEDTGDVKTTVHVLNLFELTHRGHQISEALTARRQMRRRRRGNLRYRAPRFLNRTKPKGGVAPSLQHRVETTRSWVSRLTGLAPVTGIAQELVRFDLQQMENPEISGVAYQQGTLAGYEIREYLLNKWGRECAYCGAKNTPLQIEHIHPKAKGGSGRVSNLTLACQPCNQQKGAQDLHVFLAKDPKRLARIQAQAKAPLKDAAAVNSTRWALLNTLKNTGVPVTTGSGGHTKFNRMRLGIPKTHALDAACVGNIEAIQNWKKPTLAIKATGRGSYQRTRLNAYGFPQGYLTRQKRIHGFQTGDQVKAAVTKGKKVGVYIGRVAVRASGSFNIQTAQGVVQGISYRYCQILQRADGYGYSQRGTLEKAAELRSARYPSPD

SEQ ID NO: 21921 - protein, 470 aa, unidentified; identical to SEQ ID NO: 2825

SEQ ID NO: 21922 - protein, 414 aa, unidentified
MVYVINKQGQALMPTERFGKVRRLLKNSLAHVVCRIPFTIQLDYDTTDYTQPVSLGVDAGSKHIGISATTSEKELYAADVELRNDIVDKLSTRRGLRRTRRSRLRYRKARFNNRVSSKRKGWLAPSVENKIQTHLTVVEKIHKFLPITNIVVETASFDIQKINNPSISGSEYQQGEQLDFFNVREYVLFRDNHICQHCKGKSKDKVLNVHHIESRKTGGDSPNNLITLCETCHKAYHRGEFELNVKRGKSFRDAAFMGIMRWSFYDRLKNIYPNVSMTFGYITKNTRITNNLPKEHYVDARCISGNPVAKPLGYYFYQKKVRCQNRQIHKANFLKGGRKKLNQAPFLVKGFRLFDLVEYQKELYYIFGRRSSGSFDIRKLDGTKVNKGSINCKYLRLVDTRKSILIEKRTQVNL

SEQ ID NO: 21923 - protein, 446 aa, unidentified; identical to SEQ ID NO: 4517

SEQ ID NO: 21924 - protein, 423 aa, unidentified
  source 1..423: note = Lachnospiraceae bacterium UBA2888
MKQGNRVFVLNMRGEPLMPCSQRKARVLLKEGKAIINTYNPFTIQLTYATGETKQDCHIGVDTGAKHIGIAVTSEDKVFYKAEVELRQDVSSNLDSKRIYRRGRRSRKCRYRKPRFLNRKRTDKWLPPSLQNRINHTFAWIDEFSVLVPSPVLHIEVGKFDTAKMINPDIHGVDYQLGQTYGFFDERYFVFARDNYTCQVCGKSKGKILQTHHIIYRSNGGTDRVDNLITVCTDCHTSANHKKGGILYKWQAEHKKVKQYKEPPFMNTLRRRIFDKYPNAIITYGSETTLKRKEIGLEKTHYNDAIVISSITAIKANPNEWLLIRQFRKKKRSLHESTARKGRKEPDRTQKRNRKNTPYYKGFWLNDKVSVLDQVGYITGFTSGGAYIKNKNDEYITLPGKSYKQVGISNLRLLSHNNNWQYI

SEQ ID NO: 21925 - protein, 414 aa, unidentified
MPCSPAKARLLLKEKKAIVKRRTPFTIQLTIATGESKQPVSLGVDAGYKHVGLSASTEKAELYASEVELRQDVSDLLSARRALRQSRRNRKTRYRAPRFDNRIRTKRKGWLAPSVENRINAHLSRIEAVLRLLPVTKITVETASFDLQLLKNPDISGKEYQEGEQLGFWNVREYVLFRDRHVCQHCYGRSKDPVLNVHHLESRRTGGDSPGNLITLCETCHKALHRGEITLKAKRGQSFRAETFMGIMRWEVLDRLKASHPKLEVQNTYGYRTKHARISNGIAKSHCADAFCIAGNLGAERLGEFFFQKQTRRNNRQIHKLSILKGGIRKRNQAPFEVNGFRLFDKVACQGEEGFIFGRRSSGFFDVRKLDGTRISAGISCKKLHLLEKRRTYLTEIRKEEALPPLPEGRGLRA

SEQ ID NO: 21926 - protein, 465 aa, unidentified
MSTCVCVLSNSGERLMPTIRLGKVRRLLKDGKAKIIKHHPFTIQLLYDSKANTQPIEICEDVGYNYIGISVKSQSHEYVSAQYDTLQDEKACHDSCRKLRRTRRNRLRYRKPRFDNRKRGEGWLAPSLEHKKQLNIRLIERYVSVIPITHATVEVGSFDTMLVKAIEEGKATPESADYQKGPRYNLATLREAVFYRDNYICKVCGRKATEGAILHMHHMFYWKGRHGNSLSELITVCEKCHTPANHQKSGKLYGFGENVKFADLSGAAFMNTVRWQIVNELYAAFGKDFVTVTYGAMTKEKRIALHLEKSHNNDAYAMGSFHPVNRCAFEHYEKVKRNNRILEKFYDSQYIDTRTGELTNGKSLFNGRISRGHKKDSENLHKYRGKRICKGHRALRRKKLALNPGDLVSLNGEILVVHGTHTKKNGSVNVEFKTPSKSGKKSTSLKKLKIVKTSNLMHSAWTKVS

SEQ ID NO: 21927 - protein, 431 aa, unidentified; identical to SEQ ID NO: 13124

SEQ ID NO: 21928 - protein, 442 aa, unidentified; identical to SEQ ID NO: 2903

SEQ ID NO: 21929 - protein, 400 aa, unidentified
KKAIVKRRTPFTIQLTIATGESKQPVSLGVDAGYKHVGLSASTEKAELYASEVELRQDITDLLSARRALRQSRRNRKTRYRAPRFDNRIRTKRKGWLAPSVENRINAHLSRIETVIRLLPVTKISVETTSFDMQLLKNSDIAGKEYQEGEQLGFWNVREYVLFRDGHVCQHCHGRSKDPVLNVHHLESRRTGGDSPGNLITLCETCHKALHRGEITLKAKRGQSFRAETFMGIMRWEVLDRLKASHPKLEVQNTYGYRTKHARISNGIAKSHCADAFCIAGNLGAERLGEFLFQKQTRRNNRQIHKLSIPKGGIRKRNQVPFEVKGFRLFDKVAYKGEEGFIFGRRSSGYFDVRKLDGTHISAGISYKKLRLLEKRQTYLTEIRKEEALPPLPEGRGLRA

SEQ ID NO: 21930 - protein, 512 aa, unidentified; identical to SEQ ID NO: 4350

SEQ ID NO: 21931 - protein, 413 aa, unidentified; identical to SEQ ID NO: 3023

SEQ ID NO: 21932 - protein, 424 aa, unidentified
  source 1..424: note = Cyanobacteria bacterium UBA8543
MFVFVLDINKKPLNPTHPARARKLLKTGKAAVFKRYPFTMILKEEIVEPSNQELRIKIDSGAKTTGIAILRNEVVLWAAELTHRGFQIREALTSRRQLRRSRRNRKTRYRQPRFNNRCRTDGWLPPSLISRVDNILTWAKRLLRLSPITAISTELVRFDTQLMQNPEISGIEYQQGELAGYELREYMLEKWHRKCAYCGVTDTQLEIEHIIAKSKGGSNRVSNLTLSCTKCNQKKGNKPIEQFLKNKPEVLKLILAQAKRSLADTAAVNATRWKLLNSLKELGLPVETGTGGRTKYNRCRQNLPKTHWLDASNVGASTPEDLKVLVSKPLVIKATGHGNRQMCGTNAYGFPIRHRSNIKKHFGFQTGDIVKAVVTKGKKIGSYTGRVLCRATGNFDVTTASGRVAGISHKYCSFIHRSDGYAYQ

SEQ ID NO: 21933 - protein, 440 aa, unidentified
MSNVFVLDTQKRPLDPVHPGRARILLAQGKAAVLKRYPFTIILKVVIEKPEVHPLRIKIDPGSQTTGLALVNDRTGEVVFAAELSHRGDAIKKALDQRRAVRRGRRQRRTRYRQPRFANRKRRAGWMAPSLESRVVNVLTWVKRLSGLCTISAISLELVKFDLQQMENPEISGVEYQQGTLFGYEIRHYLLEKWKRACSYCGIKEVPLQIEHIQAKANGGTDRVSNLTLACDSCNKAKGTQDIRVFLAEKPDLLARILAQAKAPLKDGAAVNTTRWALYERLKQEGLPIECGSGGLTKFNRTQRDLPKEHWIDAACVSTSTPSELQIAGIIPLLITATGHGNRQKCNVDEIGFPCSKPKGGKSVKGYQTGDIVRAVVTTGTKQGVYVGRVLVRASGSFDIRTNQGRVQGLSHRFCTPVHRSDGYSYQQGALLADHPTQSA

SEQ ID NO: 21934 - protein, 440 aa, unidentified
MPTNSYRARRLLKSKRAVIYRYRPVFTIKLADRTNGYTQQIEYKCDTGYQNIGISICSDTKEFVNEQRDLLKDEVKRHSDSRKYRRTRRNRLRYRKKRFDNRKGMISKDGFAPSTRNKRDVHIHLYEEYYKVFPITKAVFEMGQFDTQVLKAVEAGLPVPEGTDYQRGEQYGYATLREAVFVRDSYTCICCGKSAIKDGVKLRIHHIGYLSGDRSNRMANLGSVCENCHTSKNHKPGGKLYNLKPKLKTFKGATFMTMVRYSMVKKLKVTTPDVDIKVTYGAATKLARKDINVKKTHSNDAYCMGEFHPKHRSDFKHYKKCRRNSRVLSKFYDAKYRDLRDGSVKTGSQLSCGRTNRKISRHTEFDERIYRAHKISRGRVSIRRQHYSLRPGDKVLYDGKVYFVTGMQNSGTHVKLTNGKVCSLKKVHVLQHCNAWTAVI

SEQ ID NO: 21935 - protein, 456 aa, unidentified
MSTCVCVLSNSGERLMPTFRLGKVRRLLKDGKAKIVKHHPFTIQLLYDSKTNTQPIEICEDVGYNYIGISVKSESHEYVSAQYDTLQDEKACHDSCRKLRRTRRNRLRYRKPRFDNRKRSEGWLAPSLEHKKQLNIRLVERYVSVIPITHATVEVGSFDTMLLQAIQKGESKPEGVDYQKGPRYNLATLREAVFYRDNYTCQVCGRKIADGAILHMHHMFYWKGRHGYQLDELVTACEKCHTPANHQKGGKLFGFGEDKEFANLSGAAFMNAVRWQIVDALHATYGKEFVTITYGAMTKEKRIILGIEKTHSNDAYAMGDYHPVHRCVFRHYQKRRRNNRVLEKFYDATYIDARTGNKAKGKELFNGRISRNHKKDSEDLHKYRSKKVSKGRRSIRRQRYAIQPYDTVRLESKTYITSGCHNKGTRLLIPANGKSKSVAICKVQVVCHAGAWIQII

SEQ ID NO: 21936 - protein, 431 aa, unidentified; identical to SEQ ID NO: 2746

SEQ ID NO: 21937 - protein, 421 aa, unidentified
MRGQPLMPCSPAKARHLLKAGKAMVRRRTPFTIQLRIATGETKQSVTLGVDAGAKHVGLSATMEKEEVFASEVELRQDITGLLAARLSLRRERRHRKTRYRAPRFLNRVRSKHKGWLAPSVENRIQAHMSRIDAVCKLLPVTKIVIETASFDIQKIRNPTVEGTDYQQGNQLGFWNVREYVLFRDGHVCQHCHGHSKDKILNVHHLESRQTGGDAPNNLITLCETCHKAYHAGKIKLKVKRAQSFRAETFMGIMRWTLLDRVRKAHPGLPVENTYGYLTKNTRITLELPKTHCVDAYCIAGNFKAVRRGVYLYQRQVRKYNRQIHKCTVLSKTLKDGTKIGYRKLNQTPHLVKNFRLFDKVRCLEQTGFIFGRRSSGYFDVWRLDGVKLSSGISYRKLTLLEKRSTYLTELRNEDGASSPV

SEQ ID NO: 21938 - protein, 426 aa, Scytonema sp.; identical to SEQ ID NO: 2729

SEQ ID NO: 21939 - protein, 437 aa, unidentified
MPCSEKRARLLLARGRACVHRLVPFVIRLTDRQLDTCTLQPLRIKLDPGSKTTGLALVRDTEHLNTDTGEIQRGVAVLSLIELVHRGRHISEALTARRQMRRRRRGCLRYRAPRFLNRGNKQRGWLAPSLQHRINTTMAWVARIRRWSPVTALSAELVRFDMQRLQNPEISGVEYQQGTLAGYEVREYLLAKWSRKCAYCGVENVPLQIDHVHPKAKGGTNRVSNLTLACGPCNARKSAQSVDAFLAKDPKRLTALLAQAKRPLKDAAAVNATRWALVGALKATGLPVETASGGCTKFNRSRLAIPKTHALDAVCVGAVSVVTNWQKPSLTIKCTGRGSYQRTRLDKYGFPRGYLMREKSVKGFKTGDLVRAIVPTGKKAGRHTGRVAIRKSGSFNIQTLAGVVQGIGYRHCRLLQRADGYGYFFNKAACDTAQKRE

SEQ ID NO: 21940 - protein, 462 aa, unidentified; identical to SEQ ID NO: 4520

SEQ ID NO: 21941 - protein, 424 aa, unidentified
MVYVLDINGQPLMPTARHGKVRRLLNSHLAKVVKRCPFTIQLLYKSTKETQPVSLGVDAGSKHIGLAATTEQKVVYQEELIPRNDVVKLLSARRASRRSRRNRKTRYRKPRFNNRVHSKHKGWLAPSVEVKIQEHITAIKNVCKILPVSEIHVETAEFDLQRLKAMEEGKPLPVGTDYQLGEQYDFYNTRQYVLHRDGYTCQCCGTHDNDVKLHVHHIESRQTGGNAPHNLITLCEHCHKALHEGKIELPKGRKRGKSYRDAAFMGIMRNTLLKRLKKEADVPVTMTYGYITKYWREKVGLEKSHINDAICISKHPYAKPLNAYYLTKAVRRHNRRIHNVNFSKGGIRKRKRASHLVKGFRLFDKVLYQGKSYFIFGRRATGFFDIRTLDGVKVNKGSISYKKLKIQDTAKAYLKEVRIIPHIG

SEQ ID NO: 21942 - protein, 346 aa, unidentified
MVYVQDINGKPMMPTTRHGKVRRLLKDKKAVVVNLCLFTIKLMYVTSDYKQEIVLGVDAGTKHVGLSATTKSKELYSSEVILRNDIVDLLSTRRELRRSRRNRLRYRKPRFDNRIKSKRPGWVAPSVKYKVDAHIRVIDNVCSILPISRIVIEVAQFDTQKINNPNISGKEYQEGDQLGFWNVREYVLARDGHKCQHCKGKSKDPVLNVHHIESRKTGGDFPSNLITLCETCHKEYHKGNIDLKIKRGSSLRDAAVMGIMKWRLYEELKSKYDNISMTFGYVTKYNRIKHGIEKSHVFDAFVISKNFDAIRLGYYYKVRLVRRHNRQIHKQKIPKGGIKRPNQSPF

SEQ ID NO: 21943 - protein, 416 aa, unidentified; identical to SEQ ID NO: 4039

SEQ ID NO: 21944 - protein, 477 aa, unidentified; identical to SEQ ID NO: 2707

SEQ ID NO: 21945 - protein, 408 aa, unidentified; identical to SEQ ID NO: 6729

SEQ ID NO: 21946 - protein, 451 aa, unidentified; identical to SEQ ID NO: 4938

SEQ ID NO: 21947 - protein, 339 aa, Moorena sp.
MQNYVFVIDTNKQPLNPISPKKARRLLDKGKAAVFRMYPFTIILKTAINNPTISPCQIKIDPGSKVTGFALVQNNQIVWGMELEHRGGLIKKKLESRKAVRRGRRNRNTRYRKPRFLNRRRPPGWLTPSLDHRILTIQTWVKRLIKFCPVNEIWVERVKFDTQKMQNPEINGVEYQQGELAGYEVREYLLEKWGRECTYCGQQNVPLQIEHISPKSFGGSNRVSNLCLACEKCNQRKGNKPIEEFLKKKRSLLQKITSKAKQPLKDAAAVNTTRNKLVKVLQKIKPVVTGTGAQTKYNRTKLGFPKEHWIDAACVGDIEALQLKTNPDGVTKQAQMLAM

SEQ ID NO: 21948 - protein, 415 aa, unidentified
MVYVVANDGQPLMPTERHGKVCRMLKSGMAKVIKKCPFTIQLQYESKRNVQPVSLGVDAGSKHIGISATTKTKVLYESDVELRDDIVKLLATRRQLRRSRRNRKTRYRPARFDNRKRKEGWLAPSIRQKMESHLTVVANVCKILPVSRIIVETASFDIQKIKNPDIQGVEYQQGEQMDFWNIREYVFFRDGHTCQCCKGRSKDKILNVHHIESRKTGGNAPNNLITLCETCHKGYHNGTVILPKNIKRGMKFKDAAFMGIMRWAFYNALKEQYEPAIPVSMTYGYLTKNTRIRHNLPKEHHIDARCISGNPDAVSDGTYYYQKKVRCHNRQIHEQTILKGGIRKSNQAEYLVKGYRLFDKVRYHGREYFIFGRRKTGFFDIRTLSGEKVNKGSISIKKIAFVDTRKNYITERRTV

SEQ ID NO: 21949 - protein, 462 aa, unidentified; identical to SEQ ID NO: 5736
  source 1..462: note = Myxococcales bacterium UBA1671

SEQ ID NO: 21950 - protein, 413 aa, unidentified; identical to SEQ ID NO: 7540

SEQ ID NO: 21951 - protein, 532 aa, unidentified
MSTVYVLNKDGKPLMPTTRGGHVRHLLKEQKARVVRAKPFTIQLLYETDDAVQLLYLGIDPGRTNIGVAVVKADGTAVFTAHLKSRNKEIPKLMQDRKRARRARRTNGRRHRRQRRAKANGTISKKCVKQTTTQNGSVSKRAKEIGIIKRHLPGCEKDVLCIGIKNKEAKYTNRERPEGWLTPTANQLLQTHVNLVKKVQKLLPISDVVLEVNKFAFMRLNNPNIQKWQYQQGPLYKKESLESAVSEIQEHHCLFCKKPIDHYHHVVPKSENGSNTIANIVGLCAEHHNLVHKDVAWQEKLAEEKTGLNKKYGALSVLNQIIPALTNKLSVLFPKHFFVTAGKSTHDYRAAHGVSKDHWLDAYCIACSVLPSNVCDSNINNHVPYELKQFRRHDRRVLHKANMSRVYTLNGKAVATNRHKAIKQTTDSLEEFRQNYPDDVYKLKVKEHHPAYRNLNRNYPGSVFLVGKQAHVMQGIASSKDGKTTKYNDTNATTITAGKCKFVAKNSGILFVQCKFRKALSDGTTKKLQYPV

SEQ ID NO: 21952 - protein, 465 aa, unidentified; identical to SEQ ID NO: 3603

SEQ ID NO: 21953 - protein, 557 aa, Blautia sp.; identical to SEQ ID NO: 7395

SEQ ID NO: 21954 - protein, 389 aa, unidentified; identical to SEQ ID NO: 11535

SEQ ID NO: 21955 - protein, 355 aa, unidentified
VLCALRYIGIYRRTRRNRLRYRKPRFNNRISNKKEGWFAPSLKNKADQHIMLIQRLATVAPIKDIYLEVGSFDTQLLDAIAKGLPIQEGTDYQQGALYGEETLRKAVFQRDNYTCQVCGRTIKDGAKLHTHHFLYWKGRHGNRLDELCTVCEKCHTSANHQKGGKLYGWGADKKFKSYVSAAFMNTVRWYIVNQVKDLVSDTEVHTTYGAATKLARKDFQFEKSHVNDAYAMGKLHPNIRCETEYYKKVRRNNRCLEKFYDAKYIDIRDGKKKSGKELGCQRINRREPRMSEKNLRIYHGQKVSKGRRSIRKQRYSIRPGDVVLFNGQKYISKGCGSYGTQVLLDTGKSVSIKKV

SEQ ID NO: 21956 - protein, 475 aa, unidentified; identical to SEQ ID NO: 6136

SEQ ID NO: 21957 - protein, 431 aa, unidentified; identical to SEQ ID NO: 4306

SEQ ID NO: 21958 - protein, 408 aa, unidentified
MVYVQDINGKPMMPTTRHGKVRRLLKDKKAVVVNLCPFTIKLTYETTNYKQEIVLGVDTGTKHVGISATTKSKELYSSEVILRNDIVDLLATRRELRRTRRSRLRYRKSRFDNRVKSKREGWVAPSVKYKIDAHIRVINNVCSILPISRIIIEVAQFDTQKINNPEISGKEYQEGNQLGFWNVREYVLARDGHKCCHCKGKSKDKILNVHHIESRKIGGDSPSNLVTLCETCHKEYHKGNIDLKIKRGKSLRDAAIMGIMKWRLYETLKSKFSNISMTFGYITKYNRIRNNIEKSHISDAFVISNNFNAKRLGFLYKIKLVRRHNRQIHKMKIQKGGVKRLNQSPFEVFGFRLFDRVKVDNKFYFIYGRRRTGRFNIRDINGENSKDVTHKKLNLSRCKRFMVKIEMK

SEQ ID NO: 21959 - protein, 470 aa, unidentified; identical to SEQ ID NO: 2825

SEQ ID NO: 21960 - protein, 366 aa, unidentified
MVYVQDINGKPMMPTTRHGKVRRLLKDKKAIVVNLCPFTIKLMYVTSDYKQEIVLGVDVGTKHVGLSATTKRKELYSSEVILRNDIVDLLSTRRELRKTRRNRLRYRKPRFNNRIKSKRPGWIAPSVKYKVDAHIRVIDNVCSILPIFRIVIEVAQFDTQKINNPEISGKEYQEGDQLGFWNVREYVLARDGHKCQYCKGKSKDPVLNVHHIESRKTGGNSPSNLITLCETCHKEYHKGNIDLKIRRGKSLRDAAVMGIMKWRLYEELRLGCYYKVRLVRRHNRQIHKQKIPKGGIKRLNQSPFEVFGFRLFDRIMFENSYYFIFGRRKTGSFNIRDIDGKSQKNIMYKKLKSSRCKRFMIQKEMN

SEQ ID NO: 21961 - protein, 472 aa, unidentified
VVDNRLLSIKSLINIGEGVIYSSICTGLSLQTYQKRKEVPCMVYVLDINGQPLMPTTRHGKVRRLLNSHFAKVVKRCPFTIQLLYQSTKEIQPVSLGVDAGSKHIGMAATTEKKVVYQEELSPRNDVVKLLSARRTLRRTRRNRKTRYRKPRFNNRVHSKHKGWLAPSVEVKIQEHITAIKRICQILPISEIHVEISEFDLQRLKAMEEGRTLPVGTDYQLGEQYDFYNTRQYVLHRDGYTFQCCGTHDNNIKLHVHHIESRQTGGDAPSNLITLCEHCHKALHKGKLELPKGKKRGKTYRDATFMGIMRKTLLERLRKEVDVPASGTYGYITKYWRERAGLEKSHINDAICISKYPYAKPLDTYYLTKAVRNHNRQIHKSNFSKGGIRKRNQAPYLVKGFRLFDKVLYQGKEYFIFGRRATGYFDIRTLDGTKVNKGSISYKKLRIQDTAKAYLKEARAIPHMNKFTCVLA

SEQ ID NO: 21962 - protein, 425 aa, unidentified
MVFVLNRSKKPLNMISHAQARILLKNRLAVVHKIYPFTIRLRDNSCGSQDKAYTVKIDPGSRTTGIAIVDDANKVVILAEIEHRGHVIKKKLDQRKAARRSRRNRKTRYRESRFLNRTRPEGWLAPSIKSRADNVINFICKYKKLINISKVMIEYVSFDVAQMSSNTKLWGSNYQQGPLYQQKLRSFIFSRSNGKCVYCGAKATNIDHVIPRANGGTNSTYNLVASCRACNQMKSNLSLKEFGKLMGKNYSHLEPKKLPKDAAIVQSARNYMVKEITKLVTDTTTHDAWLTKYNRNELGLPKEHYYDALSVGEVPPKFNFLTDKMLTISAKGRGSRQMCSMDKYGFPRTSAKASKSVEGFQTGDIVKAVVPSGSKAGVYLGRVAVRSNRCFDIQTKTKTIEGIWHKHFHIIQRGDGYLYNYKKIL

SEQ ID NO: 21963 - protein, 416 aa, Parasutterella sp.; identical to SEQ ID NO: 10114

SEQ ID NO: 21964 - protein, 279 aa, unidentified
VVVETAEFDLQLLKAIADGKPVPQGEDYQQGEMYGHYNVRQYVLWRDNYTCQCCGTHPSKKKEVRLHVHHLESRKVGGDAPDNQVTLCESCHEKLHKGLIAEKDFKKRKRRSTRDATFMGIMRKTLMQRLCSELPIPVVKTRGYITKATREKLLVLPKSHTNDALAIAQGKRGFNVGYLPEIAQIDKIYTIRPVRHHNRQLHKATILKGGIRKSNQTEKYVFGYRLFDKVQFNGQDCFIWGRRTTGIFTIKTINGKMIKDGISFKKLKPVEKSTGYLIA

SEQ ID NO: 21965 - protein, 417 aa, unidentified
  source 1..417: note = Bacterium sp.
MVYVISHTGKALMPTNRHGKVKHLLRKGCARVVRREPFTIQLLYDNTEYTQPITLGVDAGTTHVGLSATNESDELFAAEVTLRRDIPGLLTVRREARRTRRNSRTRYRAPHFNNRTKPDGWLAPSVEHAVQSHLSLIRKVHSFLPVTKTVIEVAQFDTQLLKNPDIQGEQYQQGEQMGFWNTREYVLFRDGHTCQHCHGKSGDKVLNVHHIESRQTGGDAPNNLITLCETCHKAYHRGAFQLKVRRGASLRDAALMSIMRWTVYNRAKEEFGNVRLAYGYITKNTRIRHGQEKSHAIDARCISGHPLASSSDTLWLMRQRRRHNRQIYKANTLKGGIRKKNQAPYLVKGFRLLDKVLYDGLECFIFGRRSSGSFDIRKFDGTRVNAGISYKKLKFKSISNSFIVSQLKRNVCVSSPA

SEQ ID NO: 21966 - protein, 396 aa, unidentified
VVRRTPFTIQLTIATGESKQPVSLGVDAGYKHVGLSASTEKAELYASEVELRKDITDLLSARRALRQSRRNRKTRYRAPRFDNRIRTKRKGWLAPSVENRINAHLSRIEAVLRLLPITKITVETASFDMQRLKNPDISGKEYQEGEQLGFWNVREYVLFRDGHVCRHCHGRSKDPVLNVHHLESRRTGSDSPDNLITLCETCHKALHRGEITLKAKRGQSFRAQAFMGIMRREVLNRLKASYPELKVHETYGYLTKHARIANGIVKSHGADAFCIAGNLGAERLGEFFFQKQTRRNNRQIHKLSILKGGIRKRNQAPFEAKGFRLFDKVACQGEEGFIFGRRSSGSFDVRKLDGTRISVGISCKKLRLLEKRRTYLTEIRKEGALPPLHEGRGLRA

SEQ ID NO: 21967 - protein, 515 aa, unidentified; identical to SEQ ID NO: 13182

SEQ ID NO: 21968 - protein, 462 aa, unidentified; identical to SEQ ID NO: 2823

SEQ ID NO: 21969 - protein, 420 aa, unidentified; identical to SEQ ID NO: 11172

SEQ ID NO: 21970 - protein, 414 aa, unidentified
MVYVINKQGQALMPTERFGKVRRLLKNSLAHVVCRIPFAIQLDYDTTDYTQPVSLGVDAGSKHIGISATTSEKELYAADVELRNDIVDKLSTRREQRRTRRGRLRYRKARFNNRVSSKRKGWIAPSIENKIQTHLTIVEKIHKFLPITNIVVETASFDIQKINNPSISGSEYQQGEQLDFFNVREYVLFRDNHICQHCKGKSKDKVLNVHHIESRKTGGDSPNNLITLCETCHKAYHRGEFKLNVKRGKSFRNAAFMGIMRWSFYDRLKNIYPNVSMTFGYITKNTRITNNLPKDHYVDARCISGNPMSKPLGYYFYQKKVRCQNRQIHKANFLKGGRKKLNQAPFLVKGFRLFDLVEYKKELYYIFGRRSSGSFDIRKLDGTKVNKGSINYKHLRLIDKRKSILTEKRTQVNL

SEQ ID NO: 21971 - protein, 441 aa, Ktedonobacter sp.; identical to SEQ ID NO: 12415

SEQ ID NO: 21972 - protein, 447 aa, unidentified; identical to SEQ ID NO: 5937

SEQ ID NO: 21973 - protein, 416 aa, unidentified; identical to SEQ ID NO: 8117

SEQ ID NO: 21974 - protein, 438 aa, unidentified
LTTGKHITSAQPWQEEKFSERKVSEMTSYAFVLDADGKQLAPTKEQKAWFLIRKKRAALVSKYPMVIQLNKEIPDEEICKDEIRCGIDDGGLHVGIALVQKCQTQNKVVFKGTIEQRNDVKHLMDIRRGYRRYHRYHKRYRQARFNNRSSSKQKGRIAPSILQKRQATVRVINQLNKWINITDYWLEDVAIDIRAMTDGYKSYKWEYQKSNRLDENIRKAVILRDGCKCMECGKSNCKLEVHHIKPRRLKGSNTLGNLITLCTKCHQKTKGVEELYMDRYFALLNSSDDKNLNYAQHVMIGKKWLREQLSSLGILHLTNGGDTANKRIDWDITKSHSNDAICITNLRPNKCEIKEWTIKPMRRQSKAKTDNVLGIKHRDFVEYTFRNSETHRGYVTALYPEQNALNFQSPTKHCKKVNARKCKVIWKYSKIYWLDNVS

SEQ ID NO: 21975 - protein, 422 aa, unidentified; identical to SEQ ID NO: 5333

SEQ ID NO: 21976 - protein, 507 aa, unidentified
MSEYIYVLGMDGDPQMPTKRKRHVEKMLQTGRARVFRQVPFTIQLTYKNQPVLQPVTIAEDPGRSNIGMAVVSLRGELLSAAVVQTRNKEIVKLMERRKQYRRASRNGERKARQRLAKKCHTMVNAGFLMRKLPMYGEDKRVRCNVIKNTESRFCNRKREDGWLTPSAEHLVRTHINLIHKMQKFLPITDVAIEINRFAFLSLEDPSISGVDFQKGPLKGYDDLNASVEDLQDGHCLMCDSPIEHRHHIVPRSMQGSNTIGNIAGLCYKCHERVHKDARFEDRLKKKKAGLDKRYAAVSALNQAIPFICKRLEQEFGKEHVHYCSGRDTAMVRRSFGYHKTKEEQLHVVDAWCIAVLSLRQIPEKAPEFDHVHEILQFRRQDRSIIDAQTSRRYYHEGKKIAKNRKKAEGQREDSLQEWRKRQVERYGEEQTRKMISQLKVKKSIRRYNRLDRLMPGAVFYYQGVRYVMRGQHCEGTYLQAVGMGSKDFPAKKCKIVAHNEGLVFVS

SEQ ID NO: 21977 - protein, 367 aa, unidentified
WITPSARQLVQMHMNDLKSMCKILPISHVTLERVAFDFQKLENENIKVWEYGKGKLYGYDSPEEYIHDVQNGKCLVCGKPHIDYLHHIIPRSKGGSDKVSNIAGLCYDCHYGPMGVHNCQNTQDRLPELKSEANKQYKVSLLNSVMPVLIEEIDKFCKANSIMFSICEGHDTAKVRDMYDLQKDHCLDGFAISLVGRNVKSVDVMPDRIHQKQRYKKKSKNIIQKRNYREYYDDKKLVAINRHKGTDQKADSLEEYMNTYAETHTADECKMHFESLTVKPARRTYTFHKEGRICPLHIGDKVRYEKKNKIKGNTKVDTFICEGIYFSKDENKAKVEHNKTKSKKMKFCRAIESGCIPYIDYIKLALI

SEQ ID NO: 21978 - protein, 453 aa, Lactobacillus sp.; identical to SEQ ID NO: 4050

SEQ ID NO: 21979 - protein, 456 aa, Halomonas sp.; identical to SEQ ID NO: 4656

SEQ ID NO: 21980 - protein, 493 aa, unidentified; identical to SEQ ID NO: 2644

SEQ ID NO: 21981 - protein, 493 aa, unidentified; identical to SEQ ID NO: 7728

SEQ ID NO: 21982 - protein, 318 aa, unidentified
LVKKIQKFLPISDVVLEINKFAFMRLDNPNVQKWQYQQGPLYQNASLEEAVSEMQEHHCLFCKKPIAHYHHVVPQSENGSNTIGNIVGLCTKHHDLVHKDTAWQKKLAKKKTGLNKKYGALSVLNQIIPALTKELSSLFPKHFFATNGKSTYDYRAAHGVSKDHWLDAYCIACSVLPNDVCDSNINSRVPYELKQFRRHDKRALHKANMNRVYTLDGKKVATNRHKAIKQTTDSLEEFRQRQPDDVCKLKVKEHHPEYRNPERNFPGCVFLVGKHTHVMQGTSGSHNGQADGYYDTNGNSYSSGKCKFVAKNKGIVFA

SEQ ID NO: 21983 - protein, 430 aa, unidentified
MPKVYVLNRHGRPLMPCTPAKARHLLDAGKAKVRHRTPFTIQLLYGSTGYTQEVILGVDAGSKTIGLSAATETEELFSAEVKPRNDVVELMSARRQFRRARRNRTTRYRKPRFDNRVRSKHKGWLAPSVEVKIQEHMTAIRRACAILPVSKVVVETAEFDLQLLKAVAEGKPVPQGEDYQKGEMYGHYNVRQYVLWRDSYTCCICGVHGSVRKGVPLHVHHLESRRVGGDAPDNLVTLCTACHDKLHKGIIMAADIKKRKRRSTRDATFMGIMRMKLLRRLREQLPVPVVETRGYITKATRENLLVLPKSHTNDALAIAHGPQGFRAEYLPNIRQADRLYTICPVRHHNRQLHKATILKGGVRKANQAEKYICGFRLYDKVLYNGIECFVWGRRTSGSFLLRQLNGEKVKDGVSYKHLKLLEHSQSYLVA

SEQ ID NO: 21984 - protein, 456 aa, unidentified; identical to SEQ ID NO: 12878

SEQ ID NO: 21985 - protein, 303 aa, unidentified
APSVENRINAHLSRIGAILRLLPVTKITVETASFDTQLLKNPDISGKEYQEGEQLGFWNVREYVLFRDGHACQHCHGRSKDPVFNVHHLESRRTGGDSPGNLLTLCETCHKALHRRETKLKTKRGQSFRAEAFMGIMRWEVLNRLKASHPELEVHNTYGYRTKHTRIVNGIDKSHCADAFCIAGNLGAKRLGEFFFQKQTRRNNRQIHKLSILKHGLRKRNQAPFEVKGFRLFDKVVCQGEEGFIFGRRSSGSFDVRKLDGTRISAGISCKKLRLLEKRRTYLKEIRKEEALPPLPEGRSLRA

SEQ ID NO: 21986 - protein, 495 aa, unidentified
MSTTLARGESGGSMAGEVIHQRRHKVMAYVAVLSASGKSLMPTTAYKARKLLKSGRAKIYSYRPLFTIQMQDREEGTTQPIEMKVDTGAQYIGVSVCSEKHEYWNRRYDMLPNEKEMHDEARKNRRNRRQKLRYRAPRFDNRTHGHNRKEDQWFAPSLKHRENIHIQLAAKICAVVPVTDAYFEMGQFDIQVLKAYEAGKPIPVGGDYQKGERYGYATLREAIFARDNYTCQVCGAKLDDKHHPILRMHHIGYWKHDHSNRMGNLMTVCIKCHTAANHKPGGKLYGLEPELPTFKGAAFMNTVRWDMFTQLKKALPNVKCHITYGAMTKLKRSELNTRKTHSNDAYCMGTLHPKWRTDFQHYQKVRRNNRVLSKFYDAQYIDTRDGEKMSGAQLSCGRTKRSESRHSIKNLRGYRGRRATSKGKKPKISKGHISTRRHKYAFNTGDIVIVQGKKLTVSGTQHYGEYVVFRDKTHVAAKAKEVTMYRHGDGWVRVV

SEQ ID NO: 21987 - protein, 328 aa, unidentified
MPCSPAKARLLPKERNAIVVRRTPFTVQLTIATGETKQPVSLGVDAGYKHVGLSASTEKAELYASEIELRQDITDLLSARRELRRARRNRKTRYRGPRFDNRIRTKRKEWFAPSVENRINAHLSRIEKVLRLLPVTTITVETASFDTQLLKNPDISGKEYQEGEQLGFWNIREYVLCRDGHVCQHCYGRSKDPVLNVHHLESRRTGGDSPGNLITLCETCHKALHRGEITLKAKRGQSFRAEAFMGIMRWEVLDRLKASHPELEVQNTYGYRTKHVRIANGIAKSHCADAFCIGGNLGAERLGEFFFQKQTRRNNRQIHKLSILKGAL

SEQ ID NO: 21988 - protein, 471 aa, Leptospirillum sp.
MLPQSRALEVPDADNREGQDETVRDNTPVRNIPEGRCFARSALRPQGQCNVRFDGGFVQVFVLDKKKKPLMPCHPARARELLREGRAVVHRIAPFTIRLKDRIGGETQPIRVKLDPGSKTTGLAVVREEETDGEKTAHVLFQAEIHHRGSAIKKRLDQRRAFRRRRRSQLRYRTPRFDNRTRPDGWLPPSLRHRVDTTLAWVERLRRLVPVSELSQELVRFDMQKIENPEISGVEYQQGTLAGYEVREYLLEKWGWTCAYCGASDMPLEIDHIHPRSLGGSDRVSNLTLACRSCNLKKGNRPVGEFLAKTPERLSTILARAKAPLKDAAAVNATRWALFQALKATGLPVETASGGRTKYNRTRLDSFGFPRGFLTRTKAHFGFQTGDRVMAIVTKGKKTGTYAGRVAVRSSGSFNIQTGSGVVQGISYKDCRLLQRADGYGYSIHPITEKGGAGEGLSLPGMNAGLSRARG

SEQ ID NO: 21989 - protein, 337 aa, Oscillatoria sp.; identical to SEQ ID NO: 18802
  VARIANT 28..29: note = X can be any naturally occurring amino acid
  VARIANT 32: note = X can be any naturally occurring amino acid
  VARIANT 46: note = X can be any naturally occurring amino acid
  VARIANT 48..49: note = X can be any naturally occurring amino acid

SEQ ID NO: 21990 - protein, 413 aa, unidentified; identical to SEQ ID NO: 3220

SEQ ID NO: 21991 - protein, 442 aa, unidentified; identical to SEQ ID NO: 3234

SEQ ID NO: 21992 - protein, 413 aa, unidentified; identical to SEQ ID NO: 19628

SEQ ID NO: 21993 - protein, 408 aa, unidentified
MVYVQDIDGKPMMPTTRHGKVRQLLKDKKAVVINTCPFTIKLMYKTSDYKQEIVLGVDAGTKHVGLSATTKSKELYSSEVILRSDIVDLLSTRRELRRTRRNRLRYRKPRFDNRIKSKRTGWVAPSVRHRIDAHIRVIDNVCSILPISRIIVEVAQFDTQKIKNPNISGNEYQEGNQLGFWNVREYVLTRDGHKCQHCKGKSKDPILNVHHIESRKTGGDSPSNLITLCETCHKEYHKGKIDLRVKRGKSLRDAAVMGIMKWKLYEELKSRYDNVSMTFGYITKYNRIKYGIEKSHISDAFVISKNFNALRLGYHYKVRLVRRHNRQIHKQKVLKGGVKKPNQSSFEVFGFRLFDRVMFEGNCYFIFGRRKSGSFNIRDIDGGNQRDITYKKLKLLRCKRFMIQKETN

SEQ ID NO: 21994 - protein, 418 aa, unidentified
GKPLMPCSPAKARLLLKEKKAIVVRRTPFTIQLTIATGETKQPVSLGVDAGYKHVGLSASTEKAELYASEIELRQDITDLLSARRELRRARRNRKTRYRAPRFDNRIRTKRKGWLAPSVENRINAHLSRIEAVLRLLPVTKITVETASFDMQLLKNPDISGKEYQEGEQLGFWNVREYVLFRDGHVCQHCHGGSKDPVLNVHHLESRRTGGDSPGNLITLCETCHKALHRGEITLKAKRGQSFRAEAFMGIMRWEVLNRLKASHPELEVNNTYGYRTKHARISNGIAKSHCADAFCIAGNLGAKRLGEFFFQKQTRRNNRQIHKLSILKHGLRKRNQAPFEIKGFRLFDKVACKGEEGFIFGRRSSGYFDVRKLDGTRISAGISYKKLHLLEKRQTYITEIRKEKALPPLPEGRGLRA

SEQ ID NO: 21995 - protein, 529 aa, unidentified; identical to SEQ ID NO: 6786

SEQ ID NO: 21996 - protein, 413 aa, unidentified; identical to SEQ ID NO: 15509

SEQ ID NO: 21997 - protein, 420 aa, Moorena sp.; identical to SEQ ID NO: 3094

SEQ ID NO: 21998 - protein, 480 aa, unidentified
LYTKPLDNIGEGSLPPSGEINLKGMTFMVYVKSIDGKALMPTSNAKARKLLKQKKAKVVSLRPFVVKLTYKTKTEYIQKLNLGVDSGYSNIGFSVIDAKQEYIAGEVKLLEGMKKRLLEKASYRRIRRSRLRYRKARWNNRVKSKKKGWLAPSLKHKLDTHIKFIDYLKNILPIEKITIEVANFDIQKMKDDLISGIDYQNGDMFGFWNVREFVLHRDGHKCQNPNCKHKDKKEQILKVHHIRYRSEGGSDRPENLITFCSKCHIPANHKKGKFLYDWCVNGKKVRGFKDATFMSMIRWYLVNELKSKHNNVSITYGYITKNHRIQNGIEKSHLNDAFAITKGTNQARTKDRFLVIQDRLKNRSLEKFYDSKIIDIRTGKKVSGGDLSCGRSTRNKNLNTENLRKYRGAKISKGQRRIRKQKYFYQPNDLVKYDGKVYTVKGTQNEGKYIALKEIKKVPKVELLIPYVFKKGLNWSYGLC

SEQ ID NO: 21999 - protein, 460 aa, unidentified; identical to SEQ ID NO: 3778

SEQ ID NO: 22000 - protein, 430 aa, unidentified
MGKTVQRVFVLDNNKNQLMPCHPARARELLKKGKASIFRYYPFTIILKDREGGDTQPIQVKIDPGSKYTGVALVADFKRGKKVIWASVIHHRGYVIKKNLDTRRAVRRSRRNRKTRYRQPRFLNRKRKEGWLPPSLISRVENILTWIKRIRRFSPITGISMELVRFDTQKLQNPEIKGIEYQRGTLYGYEIKEYLLEKWGRKCVYCGKENIPLEIEHIVPKSKGGSDRISNLTLACHECNQKKGNQSIEEFLANNPERLNQIKSESKKPLKDTAAVNATRWYLFNQLKKERLPIEVGTGGQTMYNRETQGYPKEHWIDAACVGESGQNVQLEPDMKVLEIKAMGHGMRRMCFVDKYGFPKSYRPKERTYMGYKTGDIVLAKVPKGKNKGIHTGRIVIRHSPSFLLNGVGNVHPKYLTLLQRNDGYGYKIS

SEQ ID NO: 22001 - protein, 280 aa, unidentified
LLKEKKAIVVRRTPFTIQLTIATGETKQPVSLGVDAGYKHVGLSASTENAELYASEVELRQDVSDLLSARRALRQSRRNRNTRYRAPRFDNRIRTKRKGWLAPTVENRINVHLSRIETVLRLLPVTKITVETASFDTQLLKNPDIAGKEYQEGEQLGFWNVREYVLFRDGHVCQHCHGRSKDPVLNVHHLESRRTGGDSPGNLITLCETCHKELHRGEITLKAKRGQSFRAETFMGIMRWEVLDRLKASHPKLEVQNTYGYWTKHARMLSASPAILAPKG

SEQ ID NO: 22002 - protein, 425 aa, unidentified; identical to SEQ ID NO: 14003

SEQ ID NO: 22003 - protein, 415 aa, Bacillus sp.; identical to SEQ ID NO: 21045

SEQ ID NO: 22004 - protein, 414 aa, unidentified; identical to SEQ ID NO: 5310

SEQ ID NO: 22005 - protein, 490 aa, unidentified; identical to SEQ ID NO: 6170

SEQ ID NO: 22006 - protein, 536 aa, unidentified; identical to SEQ ID NO: 4526

SEQ ID NO: 22007 - protein, 392 aa, unidentified
MTNYVFVLDANGKHLSPTKEQKAWFFIRKKRATLVSKYPMVIQLNKEIPDDKICKDEIRCGIDDGGLHTGIALVQKCQTKNKVLFKGVIEQRNDVKHLMDVRRGYRRYHRYHKRYRPARFNNRSSSKKEGKIAPSILQKRQATIRAVAQLNKWINITDYWLEDVAIDIRALTDGFKPYKWQYQKSNRLDENIRKAVILRDGCQCVECGRTNCKLEVHHIKPRRLNGSNALSNLITLCERCHQNTEGREELFMDKYFALLNSSDNKYLNYAQHVMIGKKWLREQLSSLGILHLTNGGDTANKRIDWNIEKFHSNDAICITNLQPDTCDVKEWTIKPMRRQSKAKADNVLGIKHRDLVEYTFKSGETHRGYVTALYPKQNAINFQSPTKQCKKM

SEQ ID NO: 22008 - protein, 470 aa, unidentified; identical to SEQ ID NO: 2825

SEQ ID NO: 22009 - protein, 435 aa, unidentified; identical to SEQ ID NO: 16785

SEQ ID NO: 22010 - protein, 416 aa, unidentified
MVYVLDKNGQPLMPTDRHRKVRLMLQSGQAKVIKRCPFTIQLNYDSGHQTQEISLGIDAGSKHIGVSATTKIKVLYEADVELRNDIVNLLSSRRELRRGRRNRKTRYRQAKFNNRRRGNGWLAPSIRQKIGTHLTVVENICKMLPISRIMVETASFDIQKIKNPDIQGAEYQQGDQLGFWNNREYVLFRDNHTCQCCKGKSKDKILNVHHIESRKTGGNAPNNLITLCEICHTGYHKGAIQLPKTVKRGMRFKDAAFMGIMRWAFYEALKQQYEPVGTPVHNTYGYITKHTRIEHNLPKEHYVDARCISGNPEASSNGEYYYQKKVRCHNRQMHKLTILKGGIRKQNQATYLVKGYRLFDKVSYQRKEYFVFGRRKSGFFDIRTLSGKQVNKGSLSCKKLKFIATRMYYLIERRAV

SEQ ID NO: 22011 - protein, 458 aa, Scytonema sp.; identical to SEQ ID NO: 6085

SEQ ID NO: 22012 - protein, 461 aa, unidentified
VQPLYLGIDPGRTNIGVAVVKANGTAVFTAHLETRNKEIPKLMQDRKKARRARRTNGRRCRRQRRAKANGTISKKCVKQTTAQNGSVSKRAKDIGVIKRRLPGCEKDVLCIGIKNKETKFTNRTRPEGWLTPTANQLLQTHINLVKKIQKFLPISDVVLEVNKFAFMRLNNPNIQKWQYQQGPLYKKESLESAVSEIQEHHCLFCKKPIDHYHHVVPQHKNGSNTIGNIVGLCAKHHDLVHKDSAWEKKLAKKSTGLYKKYGALGVLNQIIPTLTNELSSLFPKHSFVTNGKSTYDYRAAHGVSKDHWLDAYCIACSVLPSNVCDSNINNHMPYVLKQFRRHDRRVLNNENMNRVYTLNNKAVAINRHKAKDQKTVSLEEFRKEHPDDVCKLKVKEHHPTYRNMNRNFPGSVFLVGKQIHVMQGIASSKDGKATKYNDTSATAIAAGKCKFVAKNTGILFV

SEQ ID NO: 22013 - protein, 413 aa, unidentified
MPCSPAKARLLLKEKKAIVARRTPFTIQLTIATGEAKQPVSLGVDAGYKHVGLSASTENAELYASEVELRQDVSDLLSARRALRQSRRSRNTRYRAPRFDNRIRTKRKGWLAPTVENRINVHLSRIETVLRLLPVTKITVETASFDTQLLKNPDIAGKEYQEGEQLGFWNVREYVLFRDGHVCQHCHGRSKDPVLNVHHLESRRTGGDSPGNLITLCETCHKALHRGEIKLKAKRGRSFRAETFMGIMRWGVLNRLKASHPKLEVHNTYGYRTKHARIANGIAKSHCADAFCIAGNFGAKRLGEFFQKQTRRNNRQIHKLSILKGGIRKRNQAPFEVKGFRLFDKVACQGEEGFIFGRRSTGYFDVRKLDGTCISAGISYKKLHLLEKRRTYLTEIRKEEALPPPPEGRGLRA

SEQ ID NO: 22014 - protein, 421 aa, unidentified
MQYVYVLNKHGEPLMPCSPGKARLLLKQQKACVVKRTPFTIKLLYGSAGYKQPITLGVDAGSKHVGLSASTEKRELYREEFTPRNDVVDLLSTRRQNRRSRRNRKTRYRAPRFDNRVHSKHKGWLAPSVEVKIQEHITVIKRICRILHITLVRVETAEFDTQRLKAMLKGKSLPVGTDYQLGEMYDEYNVRQYVLKRDNYTCQCCGAHPTEKKPVRLHVHHLESRHVGGNAPNNLITLCVACHKALHEGKITLDKGKKRGKPLRDAAFMGIMRNTLLARLKDELNIPVKQTYGYITKLLREKNKIPKSHVNDARCIAKAPNAKPCDTMLYTRALRHHNRQIHKAKILNGGIRKKNQAPYLVKGFRLWDKVRYNGEECFITGRRSSGYFALKKYDGTVISNSASYKKLMLLEAATNYITERS

SEQ ID NO: 22015 - protein, 430 aa, unidentified
MPNKVYVINKHGRPLMPCSPAKARHLLDAGKAKVKKRTPFTIQLVYGSSGYTQEVILGVDAGSKTIGMSASTTKEELLSAEVKPRNDVVDLLSIRREFRRARRNRKTRYRKPRFDNRVRSRHKGWLAPSVEVKIQEHITAIRRVCGILPVSKVVVETAEFDLHLLKAIADGKPVPQGEDYQQGEMYGHYNVRQYVLWRDGYTCQCCGAHATKKKEVRLHVHHLESRKVGGDAPDNQVTLCESCHEKLHKGLIAEKDFKKRKRHSTRDATFMGIMRKTLMQRLCSELPIPVVKTRGYITKATREKLLVLPKSHTNDALAIAQGKRGFNVGYLPEIAQIDKICTIRPVRHHNRQLHKATILKGGIRKSNQTEKYVFGYRLFDKVQFNGQDCFIWGRTTGIFTIKTINGKMIKDGISFKKLKPVEKSTSYLIA

SEQ ID NO: 22016 - protein, 443 aa, unidentified
LTKDENRPSGRTTGLRAEQAEPAGIRKGDTLKVFVLNMRGKPLMPCSPAKARHMLKAGKAFVVRRTPFTIKLTIATGETKQDVTLGVDAGARHVGISATTEKEEVFASEVALRQDITGLLADRLAFRRARRNRKTRYRAPRFNNRVRSKHKGWLAPSVENRIQAHISRIEAVCRLLPVTKIVIETASFDIQKIRNPEVEGTGYQQGDQLGFWNVREYVLFRDGHVCQHCHGRSRDKILNVHHLESRKTGGDAPNNLITLCETCHKAYHAGKIKLKVKRGQSFRAEAFMGIMRWTLLDRVRKTHPKLPVENTYGYLTKHKRIALGLPKTHCADAFCIAGNLKALRRGDFLFQQQTRKHNRQIHRCSILKGGVRKLNQAPFLVKGFRLFDKVRIGGQIGFVFGRRVRGIFNIRRLDKTVIGTDINCKKLSLLETRKTFLTELRKE

SEQ ID NO: 22017 - protein, 418 aa, unidentified
MVYILNKHNEPLMPCSERKARLLLKDGMAIVCRKDIFTIKLINGSYGYKQHITLGVDCGSKHVGVSATTDKQELFSANAELRNDVVKLLSDRRMLRRNRRSRKTRYRKPRFNNRIVKNGWISPSIKQKIQSHFNLVDFLHKLLPISKIVIETASFDIQKINNPSISGSEYQQGEQLDFFNVREYVLFRDNHTCQHCKGKSKDKVLNVHHIESRKTGGNSPNNLITLCETCHKAYHRGDFELNVKRGKSFRDSAFMGIMRWELYDELKLRYDNVSMTFGYITKYKRIKLGLDKEHYNDAYCICGNLAAKMLSAHHFIRFIPRHSRVLHIQKFSKGGVRRSASAPYWLNGGKPSKSGAMFTMFDKVKFNGIVCFISGSSNGYAALRDINWNKIDGCKTVVTVNKLLLISRKYGGFIVEKK

SEQ ID NO: 22018 - protein, 411 aa, unidentified
LYDSKTNTQPIEICEDVGYNYIGISVKSQSHEYVSAQYDTLQDEKACHDSCRKYRRTRRNRLRYRKPRFDNRKRSEGWLAPSLRHKKELNVNVVKMYCAVMPITHATVEVGSFDTMLVKAIQEGKAIPEGADYQKGPRYNLATLREAVFYRDNYVCKVCGRKATEGAILHVHHMFYWKGRHGNSLSELITVCEKCHTPANHQKGGKLYGFGENVKFADLSGAAFMNTVRWQIVNELYAAFGKDFVTVTYGAMTKEKRIALHLEKSHNNDAYAMGNCHPAHRCEFGHYQKRCRNNRVLEKFYDATYIDTRTGDKAKGKELFNGRISRNHKKDSEDLHKYRSKKVSKGRRSIRRQRYAIQPYDTVRLKSKSYITSGCHNKGTRLLIPANGKSKSVAISKVQVVCHAGAWIQII

SEQ ID NO: 22019 - protein, 494 aa, unidentified; identical to SEQ ID NO: 5675

SEQ ID NO: 22020 - protein, 488 aa, unidentified; identical to SEQ ID NO: 9276

SEQ ID NO: 22021 - protein, 462 aa, unidentified
MSVLVIGRNGKALMPTNPRKARLLLKKKTASVVCRHPFTIQLLYKTGCATQEGCIGIDTGSQHIGVGITCGDRVILKDEHALRSSMEKRSLLATRAVMRRGRRYRKVRYRKPKWRHHTKRMYFEKANRRGQHWRKVKTTTQSPRLKGWLPPSLQSKCDHHFRIIDRYLKYLPDPITRNLVIEAGRFDMARMNDPTIHGEMYQRGPMYDAENLRAYIFARDNYQCACCKAKAGTTRKADGTTVKLVAHHILFRSRGATDNPKYIISVCDHCHTTKAHQPGGILYSWMENNKKVARGLRDAVFMNILRKRLFARYPQSAFTYGNITATDRKQLRLPKSHANDAVAISLFGKEASTVKNICQTMHYKQIRKSKRSLHEAIPRKGRKNPNTKAVRNKKNTTQVNGFKLWDSVLANGKKLFICSFTGTSAYLIDKNGCYISQPGKTYKQWPLSKLKRLHPNGNWLMA

SEQ ID NO: 22022 - protein, 411 aa, unidentified; identical to SEQ ID NO: 3917

SEQ ID NO: 22023 - protein, 413 aa, Ferroplasma sp.
MPVFILNDDGKPLIPCKPAKARHLLSDKKAKVISSNPFTIQLLWHCEENVETITLGIDSGYKHIGFSAVTDNKELISGEVVIRTDIPKLNEEKAMYRRKKRNKLWYRKPRFMNRGNNKEGWFAPSIEHKLETHIRLIEKLKRILPVSNTVIEVASFDTQKMKNPEISGIEYQQGELQGYEIREYLLEKFHHICVYCSKTGVPLEIEHLTPRSRDGPDTVNNLAISCHECNQKKNNLTAEEFGYPEVRKRALITMRDAAFMNTVRWKLTQLTGSEHTLGFITKKNRISLSLDKTHVNDAFVIAGGTVQIRTSPFTITQRRRNNRSIQTNRKGFRPSIRRKRYAFQPGDIVVYDHERFSVVGMHNYGKSIVIKGGGKKMDINTKKVKLVKYGKGLQFAPQFLPTLSDGVSLGGVR

SEQ ID NO: 22024 - protein, 544 aa, Actinomadura sp.; identical to SEQ ID NO: 16226

SEQ ID NO: 22025 - protein, 412 aa, unidentified
RRARRTNGRRHRRQRRAKANGTISKKCVKQTTTQNGSVSKRAKEIGIIKRHLPGCEKDVLCIGIKNKEAKYTNRERPEGWLTPTANQLLQTHVNLVKKVQKLLPISDVVLEVNKFAFMRLDNPDIQKWQYQQGPLYQKESLESAVSEMQEHHCLFCKKPIDHYHHVVPKSENGSNTIANIVGLCAEHHNLVHKDVAWQEKLAEEKTGLNKKYGALSVLNQIIPALTKELSSLFPKHFFVTNGKSTYDYRAAHGVSKDHWLDAYCIASSVLPNDTCDKTINSRVPYELKQFRRHDRRALNNENMSRVYTFNGKMVATNRHKATEQTTDSLEEFRQRQPNDVCNLKVKEHHPTYRNMNRNYPGSVFLVGNQVHVMQGIAGSKDGEATTYKDTNANSIAAGKCKFVAKNSGILFV

SEQ ID NO: 22026 - protein, 413 aa, unidentified; identical to SEQ ID NO: 3295

SEQ ID NO: 22027 - protein, 424 aa, unidentified; identical to SEQ ID NO: 13009

SEQ ID NO: 22028 - protein, 419 aa, unidentified; identical to SEQ ID NO: 7217

SEQ ID NO: 22029 - protein, 522 aa, unidentified; identical to SEQ ID NO: 16031

SEQ ID NO: 22030 - protein, 422 aa, unidentified; identical to SEQ ID NO: 3922

SEQ ID NO: 22031 - protein, 512 aa, unidentified; identical to SEQ ID NO: 3057

SEQ ID NO: 22032 - protein, 408 aa, Halomonas sp.; identical to SEQ ID NO: 21647

SEQ ID NO: 22033 - protein, 447 aa, unidentified; identical to SEQ ID NO: 5316

SEQ ID NO: 22034 - protein, 444 aa, unidentified; identical to SEQ ID NO: 19934

SEQ ID NO: 22035 - protein, 518 aa, unidentified; identical to SEQ ID NO: 19733

SEQ ID NO: 22036 - protein, 343 aa, unidentified
RKYWRLLPVFSDISSIVNRKTRYRAPRFDNRIRTKRKGWLALSLENRINAHLSRIEAVLRLLPVTKITVETASFDLQLLKNPDISGKEYQEGEQLGFWNIREYVLCRDGHVCQHCYGRSKDPVLNVHHLESRRTGGDSPGNLITLCETCHKALHRGEITLKAKRGQSFRAEAFMGIMRWEVHNRLRALHPGIEVSNTYGYRTKHARIANGIAKSHCADAFCIAGNLGAERLCEFFFQKQTRRNNRQIHKLSILKGGIRKRNQAPFEVKGFRLFDKVACQGEEGFIFGRRSSGFFDVRKLDGTRISAGISCKKLHLLEKRRTYLTEIRKEEALPPLPEGRGLRA

SEQ ID NO: 22037 - protein, 515 aa, unidentified; identical to SEQ ID NO: 3339

SEQ ID NO: 22038 - protein, 430 aa, unidentified
MPKVYVLNRHGRPLMPCTPAKARHLLDAGKAKVKKRTPFTIQLVYGSSGYTQEVILGVDAGSKTIGVSASTKKEELFAANVIPRNDVVDLLSTRREFRRARRNRKTRYRKPRFDNRVRSKHKGWLAPSVEVKIQEHITSIKRVCRILPVSKVVIETAEFDLQLLKAIEEGKPVPQGEDYQQGEMYGHYNVRQYVLWRDDYTCQCCGAHATKKKEVRLHVHHLESRKTGGDAPRNLIPLCDSCHKKHHDGLITEDDFKKRKRRSTRDATFMGIMRKTLIQRLRAELTIPVAETRGYITKATREKLLVLPKSHTNDALAIAQGKHGFNVGYLPGILQIDKIYTIRPVRHHNRQLHKATILKGGIRKSNQAEKYVFGYRLFDKVQFNGQDCFIWGRRTSGYFVVKTIDGKVIHNSASFKKLRLVERASNYLIA

SEQ ID NO: 22039 - protein, 433 aa, unidentified
  source 1..433: note = Clostridia sp.
MVYVISKDGKPLMPTKNHAKVRILLKHQKAKIVKRKPFTIQLLYETTTYTQPITLGIDSGYNYIGFSAVTEKEELISGEVKLLQGISERLKKRAMYRRQRRNRLRYRKPRFDNRRKPEGWLPPSIQHKYDSHVRFINLLKSILPITEVIIEAASFDIQKIKNPDIEGIDYQNGEQKGFYNLREYVLYRDNYTCQLCGKDNLPLEVHHIGYWKPDRTDRPSNLITLCINCHTPENHLRSGKLWGWQPKLRAFKEATFMSVVRWKLVNVLGCKYTYGYITKAKRKALMLEKTHYNDAFIIAGGSNQKRVEPIYFEQVRRNNRSLEKFYDAKYIDTRTGKPATGQELFNGRRIRNKNYNTENLRKYRGQKLSKGRRSIRKQRYVYQPKDVVIYEGQKYIVKGVQNRGAYIKLEGLPKPVRIELVRPYLFRKGFCVA

SEQ ID NO: 22040 - protein, 422 aa, unidentified
LNKRGKPLMPCSPAKARLLLKEKKAIVVRRTPFTIQLTIATGESKQPVSLGVDAGYKHVGLSASTDKAELYASQVELRQDITDLLSARRALRQSRRNRKTRYRAPRFDNRIRTKRKGWLAPSVENRINAHLSRIEAVLRLLPVTKITVETASFDMLLLKNPDIAGKEYQEGEQLGFWNVREYVLFRDGHVCRHCHGRSKDPVLNVHHLESRRTGSDSPDNLITLCETCHKALHRGEITLKAKRGQSFRAQAFMGIMRREVLNRLKASYPELKVHETYGYLTKHARIANGIVKSHGADAFCIAGNLGAERLGEFFFQKQTRRNNRQIRKLSILKGGIRKRNQAPFEAKGFRLFDKVACQGEEGFIFGRRSSGSFDVRKLDGTRISAGISCKKLRLLERRRTYLTEIRKEEALPPLPEGRGLRA

SEQ ID NO: 22041 - protein, 431 aa, unidentified
MPNKVYVINKHGRPLMPCSPAKARHLLDAGKAKVKKRTPFTIQLVYGSSGYTQEVILGVDAGSKTIGMSASTTKEELLSAEVKPRNDVVDLLSTRREFRRARRNRKTRYRKPRFDNRVRSKHKGWLAPSVEVKIQEHITSIKRVCRILPVSKVVIETAEFDLQLLKAIEEGKPVPQGEDYQQGEMYGHYNVRQYVLWRDGYTCQCCGAHATKKKEVRLHVHHLESRKVDGDAPDNQVTLCESCHEKLHKGLIAEKDFKKRKRRSTRDATFMGIMRKTLMQRLCSELPIPVIETRGYITKATREKLLVLPKSHTNDALAIAQGKQGFNVGYLPGIVQINKIYTIRPVRHHNRQLHKATILKGGIRKSNQTEKYVFGYCLFDKVQFNGQDCFIWGRRTTGIFTIKTINGKMIKDGISFKKLKPVEKSTGYLIA

SEQ ID NO: 22042 - protein, 494 aa, unidentified; identical to SEQ ID NO: 15434

SEQ ID NO: 22043 - protein, 432 aa, unidentified; identical to SEQ ID NO: 16069

SEQ ID NO: 22044 - protein, 418 aa, unidentified
MVYVLGQDGHPLMPTCRHGKVKRMLKSRMAKVVKKCPFTIQLQYESTTHTQKINLGIDAGSKTIGVSATTDSKVLYESEVVLRNDIVELLSGRRALRRSRRNRKTRYRKPRFDNRRRPDGWLTPSIRQKIKTHVTVVENVMKILPVTKIIVETASFDIQKIKNPEIEGAEYQYGEQLDFWNVREYVLFRDGHTCQCCKGKSKDNILNVHHIESRKTGGNAPNNLITLCETCHKAYHKGVITLPKEIHRGMRFRDAAFMGIMRWAFYDRLKELYTPFGVEVINTYGYITKNTRIEHGLPKEHYVDARCISGNPAAKPLGHYYFQKKVRCHNRQIHKNTILKGGIRKRNQAAYLVKGYRLFDKVKYQNQEYFIFGRRSSGFFDIRTLNGTKVNKGSISCKKLQLVEKSKHYLTEQRKVTT

SEQ ID NO: 22045 - protein, 472 aa, unidentified; identical to SEQ ID NO: 13504

SEQ ID NO: 22046 - protein, 528 aa, unidentified; identical to SEQ ID NO: 20672

SEQ ID NO: 22047 - protein, 431 aa, unidentified
MLVYVISKDGQPLMPISRCGKVRRLLKNKQAKVVRRCPFTIKLLFEPEHNFVRECYLGVDTGSKHVGVAVVSNDRVLYQSQTELRVNIKKKIDYRRMYRRYRHYRKTRYRKCRFLNRRNSIKKDRLPPSVQHKVQAHIDEIEFCKKILPVLDENIILEVSQFDTALMKNPSLMNEKIKHWGYQQGFNYGYSSRRSAILHRDNYTCQCCGKKNTRLEVHHIIYRTNGGSNDETNLITLCKECHTKVHKGIITIDKKPKKLRFKHATHMSIIRSRLLKVYPQAIETFGFVTSENRHHLGLEKAHYIDACVIASGGLEFEPSDTIYYKRRVSCNERKLTKGVRDEQKLPVGKIQGFRRFDKVKYFGKEYFIMSRITRGGYAFLMDIFNNKIDFSDKPKGWRWPKLLNCKRISARRSTLCMLTTMIVSENKNSNQ

SEQ ID NO: 22048 - protein, 421 aa, unidentified
MRGQPLMPCSPTKARHLLRDKKAVVNRRTPFTIQLTIATGETKQDVTLGVDAGAKHVGLSATTEKEEVFASEVELRQDITKLLSARLAFRRSRRHRKTRYRAPRFLNRVHSKHKGWLAPSVENRIQAHMSRIDAICGLLPVTKIVIETASFDIQKIKNPDIEGTDYQQGDQLGFWNVREYVLFRDGHVCQHCRGRSKDKVLNVHHLESRQTGGDAPNNLITLCETCHKAYHAGKIKLKVKRGQSFRAEAFMGIMRWTLLDRVRKAHPDLPVENTYGYLTKNTRITLGLPKTHCIDAYCIAGNLNARRRGVYLYQRQMRKHNRQIHKCKVLSKTLKDGTKVGYRKLNQTPYLVKNFRLFDKVRCFGQTGFIFGRRTSGHFDVRTLNRTRLSDCVNSKKLTLLEKRRTFLTELRKEDGASSPV

SEQ ID NO: 22049 - protein, 512 aa, unidentified
MSTVYVLNKDGKPLMPTTRCGHVRHLLKEQKARVVTSKPFTIQLLYEADDVVQSLYLGIDPGRTNIGVTVVKADGTAVFTAHLETRNKEIPKLMKKRKESRRARRTNGRRCRRQRRAKANGTISKKCVKHDTAQNGSVSKRAKEIGVIKRHLPGCEKDVLCIGIKNKEAKFSNRTRPEGWLTPTANQLLQTHINLVKKIQKFLPISDVVLEINKFAFMRLDNPNVQKWQYQQGPLYQKANLEETVSEMQEHHCLFCKKKIDHYHHVVPQHKNGSNTIDNIVGLCTQHHDLVHKDATWQKRLAKKKTGLNKKYGALSVLNQIIPALTKELSSLFLKHFFVTNGKSTYDYRAAHGVSKDHWLDAYCIACSVLPNDTCDKTINSRVPYELKQFRRHDRRALNNENMSRVYTFNGKMVATNRHKATEQTTDSLEEFRQRQPNDVCNLKVKEHHPTYRNMNRNYPGSVFLVGNQVHVMQGIASSKDGEATTYKDTNANSIAAGKCKFVAKNSGILFV

SEQ ID NO: 22050 - protein, 483 aa, unidentified
MQKLRERNTYTPTDIPHVRGNCDSRLISPEGRGRAANLKTSFNNPDAALTAREQAGQALRVPAIYVLNKRGKPLMPTTANKARRLLKKGLAKVVRRTPFTIQLLCPTGEALLPVQLGVDSGYSHVGLSAVSEKRELYSEEVHLRDDIVKLNAERKQYRRGRRYRKTWYRKARFLNRGNKKTGWLAPSLQNKLNAHLKTVEKVRKILPISQITVEIASFDIQKIQKMDIEGTDYSQGVQLGFENVRAYVLHRDGHTCQHCKGRSKELTLHVHHIKSRQTGGNRPDNLVTLCTSCHRNHHEGNITLKIKKSNGFKAETFMTTIRRTLMDQVRDKGIFIAPTYGYITQQNRRNLELPKSHVHDAFVIAGGKEQKRSPTTYFTKQVRKCNRKLFKGDRSHLPNTAPRFIQGFQRFDKVLWKRQECFVFGRRMIGYFDLRLLDGTKIHASAKIKDLKILESAKSFLTEVRRAHSSDSTRLSVSCVNFL

SEQ ID NO: 22051 - protein, 421 aa, unidentified; identical to SEQ ID NO: 7313

SEQ ID NO: 22052 - protein, 404 aa, unidentified
MPCSNKKARQLLKNKKAEIIKYNPFTIRLLYATGETNQEINIGVDTGAKYIGIAITSQDKILVKGEIELRQDVKENLFSKKIFRKSRRNRKTRYRQARWNNRKRKDNWLPPSVQSKVDNQINWINKFVSLFPNSNLIIEVGKFDTAKMINPEIEGKEYQQGNLYEYENVKSYIIARENNKCQICGKDYDNNGWHLHHIKQRKDGGTDKVDNLALVHEQCHKDFHLGKFPKFKFTKPKEYKDATFMNILRQQIFERVNCKITYGSYTKVDRNNLNLDKTHYNDAIAISGIKNIKETTSDIFLIKQFRKKKRSLHEATARKGRKEPNVKSIRNSKNTKYSSGFYLNDKVKVFGKIGWISGFCSGGCYVKDIDDNYIIIPNKNYKQVGFKRLVLMCHNNNWQFICTR

SEQ ID NO: 22053 - protein, 471 aa, unidentified; identical to SEQ ID NO: 12870

SEQ ID NO: 22054 - protein, 430 aa, Oribacterium sp.; identical to SEQ ID NO: 10842

SEQ ID NO: 22055 - protein, 417 aa, unidentified
MPCSPAKARLLLKEKKAIVKRRTPFTIQLTIATGEAKQPVALGVDSGYKHIGLSATTEKAELYASQVELRQDITDLLSARLALRRSRRSRKTRYRAPRFDNRVASKRKGRLAPSVENRIAAHMSRVEAVMRVLPVTAITVETAVFDTQLLKTPDIAGAAYQQGEQLGFWNVREYVLFRDGHVCQHCRGKSKDPILNVHHIESRRTGGDAPNNLITLCETCHKAFHRGEIKLKVRRGKSFKAETFMGIMRWTLLERLKKAHPELRVRNTYGYLTKHKRISHGIAKSHCADAYCIADNLGAKRLEGFFFQKQTRKHNRQIHKLLILKGGLKKKNQAPYEVKGFRLFDKVICKGEEAFIFGRRTSGSFDVRRLDGTRISAGINYKKLRLLEPRTTYLTEFRKEAALPPLHKCRGVCAEFL

SEQ ID NO: 22056 - protein, 431 aa, unidentified
MDAWDIIVVLNKRGKPLMPCSPAKARLLLKEKKAIVKRRTPFTIQLTIATGESKQPVTLGVDAGYKHVGLSASTEKAELYASEVELRQDVSDLLSARRALRQSRRNRKTRYRAPRFDNRIRTKRKGWLAPSVENRINAHLSRIEAVLRLLPVTKITVETASFDLQLLKNPDISGKEYQEGEQLGFWNIREYVLCRDGHVCQHCYGRSKDPVLNVHHLESRRTGGDSPGNLITLCETCHKALHRGEITLKAKRGQSFRAEAFMGIMRWEVLNRLKASHPELEVNNTYGYRTKHARIANDIAKSHCADAFCIAGNLGAERLGEFFFQKQTRRNNRQIHKLSILKGGIRKRNQAPFEVNGFRLFDKVACKGEEGFIFGRRSSGFFDVRKLDGTCISAGISYKKLHLLEKRRTYLTEIRKEEALPPLPEGRGLRA

SEQ ID NO: 22057 - protein, 442 aa, Lactobacillus sp.; identical to SEQ ID NO: 9293

SEQ ID NO: 22058 - protein, 494 aa, unidentified
MAMVYVQNKDGKPLMPTTRYCYVRLLLKENKARVVCTTPFTIQLNYDTPDITQDLILGIDPGRTNIGVAVVKEDGQCVFSAHLETRNKDIPLLMKKRAGFRRQHRTLDRRRKRQRRARAAGTTIAEGSVERLLPGYEKPVVCHYIRNKAARFNNRSRPAGWLTPTANHLLQTHINLIAKVAKFLPITKVVVELNRFAFMAMDNPNIHRWEYQQGPLYGLGSVEDAVYAQQDGHCLFCKKPIDHYHHVIPRHKGGSETLANRCGLCAKHHDLVHKDKAWADKLVTRKEGMNKKYHALSVLNQIIPFLMEYLGSETPYDVYATDGKSTKGFRVAKNVPKEHYTDAYCIACSILDTDVDVSAPTSPFELKQFRRHDRQACIRQMVDRKYLLDGKVVAANRHKAFEQESDSLQEFREAYGDAAVSQLTVKPHSPQYKDMTRIMPGAVMDFGGAVGILQGSEGFHNGKPDYYKSTKGERVLTRRCALLAQNAGMVFIPA

SEQ ID NO: 22059 - protein, 423 aa, Microcoleus sp.
MSNFIFVLDTNRKPLTPCKPSMARKLLVAGKAAVFRRFPYTIILKKAVTASIESISLKLDPGSKTTGIALLQGEKVIFGAELTHRGQAIKASLESRRLLRRVRRNRHTRYRQARFLNRTRRKGWLAPSLQHRVETTLTWVNKFIRLAPVSSIAMELVRFDLQQLENPEISGVEYQQGELLGYEIREYLLNKWDRKCAYCGAENLALQVEHIHPKAKGGSNRISNLCLACEKCNVKKGTQDIKDFLFKKPDLLKQIMAQVKRPLKDAAAVNSTRWALFNRLKLTGLPVTTGSGGQTKYNRTRLKLPKPHWLDAACVGQIESLSVLTSNPLLIKATGHGTRQMCRTDKFGFPSRYVPREKFVKGFQTGDIVKAVVTSGKKVGEYVGRVAVRSTGSFNVSASELVQGISHKYCKIVHHKDGYSYSF

SEQ ID NO: 22060 - protein, 424 aa, unidentified; identical to SEQ ID NO: 10419

SEQ ID NO: 22061 - protein, 456 aa, unidentified
MSTCVCVLSNSGERLMPTFRFGKVRRLLKDGKAKIVKHHPFTIQLLYDSKANTQPIEICEDVGYNYIGISVKSQSHEYVSAQYDTLQDEKACHDSCRKLRRSRRNRLRYRKPRFDNRKRGEGWLAPSLEHKKQLNIRLIERYVSVIPITRATVEVGSFDTMLLQAIQKGESKPEGVDYQKGPRYNLATLREAVFYRDNYTCQVCGRKVADGAILHMHHMFYWKGRHGYQLDELVTACEKCHTPANHQKGGKLYGFGKDKKFANLSGAAFMNAVRWQIVDALHATYGKEFVTITYGAMTKEKRIALQLEKTHNNDAYAMGDYHPACRCKFRHYQKRRRNNRVLEKFYDATYIDARTGNKAKGKELFNGRISRNHKKDSENLHKYRSKKVSKGRRSIRRQRYAIQPYDTVRLENKTYITSGCHNKGTRLLIPANGKSKSVAISKVQVVCHAGAWIQII

SEQ ID NO: 22062 - protein, 431 aa, unidentified; identical to SEQ ID NO: 11325

SEQ ID NO: 22063 - protein, 465 aa, unidentified
MSTCVCVLSNNGERLMPTIRLGRVRHLLKDGKAKIIKHHPFTIQLLYDSKTNTQPIEICEDVGYNYIGISVKSQSHEYVSAQYDTLQDEKACHDSCRKLRRTRRNRLRYRKPRFDNRKRGDGWLAPSLKHKKELNVNVVKMYCTVMPITHATVEVGSFDTMLVKAIQEGKVIPEGADYQKGPRYNLATLREAVFYRDNYVCKICGRKATEGAILHMHHMFYWKGRHGNSLNELLTVCEKCHTPANHQKSGKLYGFGEKIKFADLSGAAFMNTVRWQIVNELYVAFGKPFVTITYGAMTKEKRIALQLEKSHNNDAYAMGEFHPNLRCMFEHYEKARRNNRILEKFYDSRYIDIRTGEIATGKELFNGRINRNHKKDSENLHKYRGKRTYAGHRALLRKKMNLNPGDLVSLNGENLIVHSTHTKKNGAVNVEFETPAKSGQKSASLKKLKIVKAADSIHPAWKKIS

SEQ ID NO: 22064 - protein, 431 aa, unidentified
MPNKVYVINKHGRPLMPCSPAKARHLLDAGKAKVKKRTPFTIQLVYGSSGYTQEVILGVDAGSKTIGMSASTTKEELLSAEVKPRNDVVDLLSTRREFRRARRNRKTRYRKPRFDNRVRSRHKGWLAPSEEVKIQEHITAIKMVCRILPVSKVVVETAEFDLQLLKAIADGKPVPQGEDYQKGEMYGHYNVRQYVLWRDGYTCQCCGAHTTKKKEVRLHVHHLESRKTGGDAPGNLVTLCDSCHEKLHKGLITEDDFKKRKRRSTRDATFMGIMRKTLMQRLCSELPIPVVKTRGYITKATREKLLVLPKSHTNDALAIAQGKHGFNVGYLPGIEQIDKIYTIRPVRHHNRQLHKATILKGGIRKSNQAEKYVFGYRLFDKVQFNGQDCFIWGRRTSGYFVVKTIDGKVIHNSASFKKLRLVERASNYLIA

SEQ ID NO: 22065 - protein, 430 aa, unidentified; identical to SEQ ID NO: 6608

SEQ ID NO: 22066 - protein, 422 aa, unidentified
MQYVYVVGSNGKPLMPCSPAKARKLLKSKSAAVLQRTPFTIKLLHHAGGYKQPITLGVDAGSKHVGLSACTDTEELYKEELTPRNDVVKLLSARRECRRGRRHRKTRYRAPRFNNRVHSKHKGWLAPSVEVKIQEHITAIHRICRRLPITKIVVETAEFDTQRLKAMLEGKPLPVGIDYKRGEMYDEYNVRQYVLKRDNYTCQHCGARGSAEKGIKLHVHHLETRQTGGNAPNNLITLCKDCHTALHDGKITLKLDKKKRGKPLRDSAFMGIMRKTLLSRIRKEVAIPVVETQGYITKLLREENHIQKSHTNDARCIAGCPKALPCDTTYHTKAIRHHNRKIHKINILKGGVRKLNQAPYKVFGFRIWDKVKYKGQECFITGRRSSGYFALKKLGGTTISNSANYKKIHFLEPANHYIIERS

SEQ ID NO: 22067 - protein, 414 aa, unidentified; identical to SEQ ID NO: 3759

SEQ ID NO: 22068 - protein, 453 aa, unidentified
MSVAVVSKTGMLLMPTSEYRARKLLKSKKAIIHGYHPFTIQLTERETGYIQPVELCMDTGYIHIGTSVKSEKHEYLGEQIDTLTDERQKHDACRMYRRQRRNRKRYRQPRFNNRERDDGWIAPSLEHKKTIHIQAISRICKVIPVTDITLEMGNFDTQVLKAREEGRPLPQGLDYQHGERYSVTTLREAVFLRDGYTCQCCGRTIKDGAILHAHHVVYRSQGGTNRISNLITVCDKCHTPANHKPGGKLYGWKPKVASFKGATYMTTIRWKLYNEVKALFLDIDIHITYGAETKERRRAFDITKSHVNDAFVMGQFHPKHRSKPVCYKKKRRNNRCLEKFYDAKYIDSRNGKTRTGQELFNGRISRNHKKYSENLHQYRRQKISAGKRTIRKQHYAIQPHDIVIFNGEKFETSGCHNNGTRVILLPQKKSVAIKKLNIYRYAGGYFKSAFNQK

SEQ ID NO: 22069 - protein, 518 aa, unidentified
MTPKKRKEASRMSEYIYVLGMDGDPQMPTKRKRHVEKLLQAGRARVFRQIPFTIQLTYENKPVLQPVTIAEDPGRSNIGMAVVSLSGELLSAAVVQTRNKEIVKLMEKRKQHRRASRNGERKARQRLAKKCHTMIKTGFLMRKLPMYGKDKRVRCNVIKNTEAKFCNRKREDGWLTPSAEHLVRTHINLIHKMQKFLPITDVAIEINRFAFLSLEDPSISGVDFQNGPLKGYDDLNVAIEDLQDGHCLMCNSPIEHRHHIVPRSMQGSNTIGNIAGLCCKCHERVHKDARFEDRLKKKKAGLNKRYAAVSVLNQAIPFICKRLEQEFGKEHVYYCSGRDTSMVRRSLGYHKTKEEQLHEVDAWCIAVLALQHVPEKAPEFDHVHEILQFRRQDRSRIKAQTSRAYYHEGKKIAKNRKKAEGQKDDSLQGWRKRQVERYGEEQTRKMISQLKVKKSIRRYNRLDRLMPGAVFYYQGVRYVMRGQHSNGQYLQAVGMRDKDFPAKKCKIVVHNQGLVFVS

SEQ ID NO: 22070 - protein, 413 aa, unidentified
MTGYAFVLDVNGKQLAPTKEQKAWFLIRKKRVILVSKYPMVIQLNKEIPDEEICKDEIRCGIDDGGLHVGIALVQKCQTKNKVIFKGIIEQRNDVKHLMEVRRDYRNYHRYHKRYRQARFNNRSSSKREGRIAPSILQKRQATIRVINRLNKWINITNYWLEDVSIDIRALTDGYKSYSWQYQRSNRLDENIRKAVILRDNCECKECGKGNCRLEVHHIKPRRLNGSNTMDNLITLCENCHQKTEGQEELYMSRYFDLLKSSDNKRLNYAQHVMIGKKWLREELSNLGILYLTNGGDTANKRIDWGIEKSHSNDAICITDLQPDICNIKEWTIRPMRRQSKAKTDNVLGIKHRDLVEYTFKNGETYKGYVTALYPEQKAINFQSPTKHCKKVNARKCKLLWKYSKIYWLENAG

SEQ ID NO: 22071 - protein, 406 aa, unidentified; identical to SEQ ID NO: 6079

SEQ ID NO: 22072 - protein, 413 aa, unidentified; identical to SEQ ID NO: 5965

SEQ ID NO: 22073 - protein, 462 aa, unidentified
MSVLVIGRNGRALMPTNPRKARLLLKKKTASVVCRHPFTIQLLYKTGCATQEGSIGIDTGSQHIGVGITCGDRVILKDEHALRSSMEKRSLLATRAAMRRGRRYRKVRYRKPKWRHHTKRMYFEKANRRGQHWRKVKTTTQSPRSKGWLPPSLQSKCDHHFRIIDRYLKYLPDPITRNLVIETGRFDIARMNDPTIHGEMYQRGPMYDAENLRAYIFARDDYQCACCKAKAGTTRKADGTTVKLVAHHILFRSRGATDNPKYIISVCDHCHTTKAHQPGGILYSWMENNKKVARGLRDAVFMNILRKRLFARYPQSAFTYGNITATDRKQLRLPKSHANDAVAISLFGKEASTVKNICQTMHYKQIRKSKRSLHEAIPRKGRKNPNTKAVRNKKNTTQVNGFKLWDSVLADGKKLFICSFTGTSAYLIDKNGCYISQPGKTYKQWPLSKLKRLHPNGNWLMA

SEQ ID NO: 22074 - protein, 472 aa, unidentified
VVGNNLLSIKPLINIGEGVIYSSICTGLSLQTYQKRKEVPYMVYVLDIDGQPLMPTTRHGKVRRLLNNHLAKVVKRCPFTIQLLYQSTKETQPVSLGVDAGSKHIGMAATTEKKVVYQEELSPRNDVVKLLSARRTLRRTRRNRKTRYRKPRFNNRAHSKHKGWLAPSVEVKIQEHITAIKRICQILPISEIHVETAEFDLQRLKAMDEGSPLPVGIDYQLGEQYDFYNTRQYVLHRDGYTCQCCGTHDNNIKLHVHHIESRQTGGDAPNNLIILCEHCHKALHEGKLELSKGKKRGKSYRDATFMGVIRKTLLERLKKEIDVPVEGTYGYITKYWRERAGLEKSHIHDSVCISKYPYAKPLDIYYLTKTVRHHNRQIHKSNFSKGGIRKRNQAPYLVKGFRLFDKVLYQGKEYFIFGRRATGYFDIRTLDGTKVNKGSISYKKLRIQDTAKAYLKEARAIPHMNKFTCILA

SEQ ID NO: 22075 - protein, 515 aa, unidentified
MTALEEKLSKTEYIYVLGFDGKPQMPTRRKRHVLKLLKTGRARIAEDIPFTIRLTYRNAPVLQPVTLAEDPGRTNIGAAVLSPLGDLLFAAVIETRNKEIKKLMADRQKSRQASRRGERKARQRLAKRYGSMVKSGMVMRKLPMYAADKFVTCKFIRNTQARFCNRKRCPDWITPTVQHLVQTHLNIIRKISRYLPVTDIAFEVNRFAFMHMENPKAMGVDFQNGPLKGYDDVKEAICTQQHGKCLMCKKPISHFHHIVPRSRGGSDTIQNLAGLCPECHTKVHTDTTFRKDFDRKKSGQLKKYGALSALNQAVPFICKKLLEEYGEEHVHFCGGLDTSLIRTALGFEKTKKNQMHEVDAYCIGLAALEINEVETPAFDHTFQIRQFRRQDRSIIHHQTGRSYYQGKEKVAQNRKPGFEQKTTALSQWYEEQVRIHGEKEAEKLRSQLRVEKSCRHYNDMDRFLPGAVFLYEGKRYVLSGRITNGKYLRACGQGMKNFPAAECTFIRHNAGLVFI

SEQ ID NO: 22076 - protein, 450 aa, Clostridium sp.; identical to SEQ ID NO: 10358

SEQ ID NO: 22077 - protein, 420 aa, unidentified; identical to SEQ ID NO: 3153

SEQ ID NO: 22078 - protein, 406 aa, unidentified; identical to SEQ ID NO: 7406

SEQ ID NO: 22079 - protein, 494 aa, unidentified; identical to SEQ ID NO: 5897

SEQ ID NO: 22080 - protein, 481 aa, unidentified
ARVVTSKPFTIQLLYETDDVVQPLYLGIDPGRTNIGVAVVKADSTAVFTAHLETRNEEIPKLMQGRKKARRARRTNGRRCRRQRRAKANGTISKKCVKQTTAQNGSASKRAKEIGVIKRHLPGCEKELLCIGIKNKETKFSNRTRPEGWLTPTANQLLQTHINLVKKIQKFLPISDVVLEINKFAFMQLDNPNIQKWQYQQGPLYQKASLEEAVSEMQEHHCLFCKKPIAHYHHVVPQSENGSNTIGNIVGLCTKHHDLVHKDATWQKKLAKKKTGLNKKYGALSVLNQIIPALTKELSSLFPKRFFATNGKSTYDYRAAHGVSKDHWLDAYCIACSVLPNDTCDRTINSRVPYELKQFRRHDRRALHKENMSRVYTLNGKSVATNRHKATEQTTDSLEEFRQRQPNDVCKLKVKEHHPTYRNMNRNYPGSVFLIGKQVHVMQGIAGSKDGEATTYKDTNANSIAAGKCKFVAKNSGILFV

SEQ ID NO: 22081 - protein, 480 aa, unidentified
LYTKPLDNIGEGSLPPSGEINLKGMTFMIYVKSIDGKALMPTSNAKARKLLKQKKAKVVSLRPFVVKLTYKTKTEYTQKLNLSVDSGYSNIGFSVIDTKQEYIAGEVKLLEGMKKRLLKKASYRRIRRSRLRYRKARWNNRVKSKKKGWLAPSLKHKLDTYIKFIDYLKNILPIGKITIEVANFDIQKMKDDLISGIDYQNGAMFGFWNVREFVLHRDGHKCQNPNCKHKDKKEQILKVHHIRYRSEGGSDRPENLITLCSKCHTPANHKKGKFLYDWCVNGKKVRGFKDATFMSMIRWYLVNELKSKHNNVSITYGYITKNHRIQNGIEKSHLNDAFAIAKGTNQARTKDRFLVIQDRLKNRSLEKFYDSKIIDIRTEKKVSGGDLSCGRSTRNKNLNTENLRKYRGAKISKGQRRIRKQKYFYQPNDLVKYDGKVYTVKGTQNEGKYIALKEIKKVPKVELLIPYVFKKGLNWSYGLC

SEQ ID NO: 22082 - protein, 248 aa, unidentified
GTGYQQGDQLGFWNVREYVLFRDGHVCQCCKGKKKDPILNVHHIESRKSGGDAPNNLITLCETCHKGYHNGTIKLPKRIKRGMKFKDAAFMGIMRWTFYNTLKEKYEPDIPVSMTYGYLTKNTRIQHNLPKEHYIDARCISGNPDAKSDGVYYYQKKIRCHNRQIHKFNTLCKGVRKLNQSEYLVKGYRIFDKVRYQGKEYFVFGRRKTGFFDIRTLSGEKANNGSLSIKKIAFVDTRKNYITERRTV

SEQ ID NO: 22083 - protein, 416 aa, unidentified
MVYVLDKNGQPLMPTDRHRKVRLMLQSGQAKVIKRCPFTIQLNYDSGHQTQEISLGIDAGSKHIGVSTTTKIKVLYEADVELRNDIVDLLSSRRELRRGRRNRKTRYRQAKFNNRRRGNGWLAPSIRQKIGTHLTVVENICKMLPISRIMVETASFDIQKIKNPDIQGAEYQQGDQLEFWNVREYVLFRDGHTCQCCKGKSKDKILNVHHIESRKTGGNAPNNLITLCETCHTGYHKGTVQLPKAIKRGMRFKDAAFMGIMRWAFYEALKQQYEPVGTPVHNTYGYITKHTRIEHNLPKEHYVDARCISGNPDAFPSGEYYYQKKVRCHNRQIHKLTILKGGIRKQNQATYLVKGYRLFDKVSYQGKGYFVFGRRQSGFFDIRTLSGEKVNKGSLNCKKLKFIATRTYYLTERRAV

SEQ ID NO: 22084 - protein, 451 aa, unidentified; identical to SEQ ID NO: 5203

SEQ ID NO: 22085 - protein, 406 aa, unidentified; identical to SEQ ID NO: 2874

SEQ ID NO: 22086 - protein, 442 aa, unidentified
MSTSVFVLDKKHRPLMPCRPARARRLLRAGRARVVKRFPFVIRLVDRTVEQSEVQPVLIKLDPGSRETGAAVVRDDEKMRHHALAFFVIKHRGGAIRDALKARSAFRRRRRSQNFRCRSPRFLNRVKPKGWLPPSLRHRVETTLSFVRRMCRYLPVSGIATELVKFDSQKLQNPEVSGVKYQQGTLFEYEVREYLLEKFGRKCVYCGAEGVPLNIDHVVPRAKGGSNRVSNLVLACVSCNQKKGARSLEDFLKGKPEVLARVRRELKTPLRDAAAVNATRWVLFNELKATGLPVETGSGALTKLNRHAFGVEKEHWLDALCVGRLNGVVTRKGLNVLEIRCMGRGSRQRTRLTKYGFPRGYLMRQKCVHGFATGDMVEANVPKGKKAGLWRGRVAVRVSGSFNIQTPKGVIQGVGWKHCRLISHNDGYGYAWLGHAPHSSPA

SEQ ID NO: 22087 - protein, 412 aa, unidentified
GLGDVYKRQVQDIYGRPLMPTTRHGKVRRLLKSKKATVVNLCPFTIRLLYDTTGYKQEITLGVDTGTKHVGLSATTKSKELYASEVILRSDVVDLLSTRRELRKIRMYRLRYRKPRFMNRIKSKKRGWIAPSIRQKIDSHIRIIGFVYSILPVSKLIIEVAQFDTQKIKNPEISGKEYQEGEQLGFWNVREYVLARDEHKCQHCKGKSKDPVLNVHHIESRKTGGDSPSNLITLCKTCHKEFHKGNIKLKVNRGESLRDAAVMSIMKWELYDELKSLYPNVKMTFGYITKYNRINHGIEKSHVSDAFVISRNFDSERLGYYYKRKLVRRHNRQIHKMKAPKGGNKRMNQSPFKVFGFRLFDKVMFQGKERFIYARRLRGIFNIRDINGENKKDISYKKLEYVSHGLISIVAG

SEQ ID NO: 22088 - protein, 425 aa, Planktothrix sp.; identical to SEQ ID NO: 3728

SEQ ID NO: 22089 - protein, 406 aa, unidentified; identical to SEQ ID NO: 9803

SEQ ID NO: 22090 - protein, 357 aa, unidentified
MNRVFVLSKTGKALMPCRPARARQLLQSKKARVKRLYPFTIQLTQRSDGYIQPVELKFDPGSRQTGIGLVLHGKNRLSAIYGAVLTHRGQEIKSNLDSRRIIRRARRNRKTRYRQTEYLLEKYNYSCVYCGVKNVSFEKEHVIPRSCGGSNRISNLVLSCHDCNQKKDNLPIDEFLKDNPALLKKIKAQLKSSLKDAAAVNITRRQIVKELGNINVPVLTGTGAETKYNRVSQGYEKEHYIDALCAGTTGAKVYIPKKLKPLLIKKERRNNRQMCLVDKYGFPRGKAKGSKIVHGFKTGDIVKAVVLKGKKKGTYKGKVAVRSSGSFNIKVKQGIVEGIGWKNCVMLYRFDGYSYTC

SEQ ID NO: 22091 - protein, 420 aa, Moorena sp.; identical to SEQ ID NO: 2869

SEQ ID NO: 22092 - protein, 412 aa, unidentified
MENKMEYCFVVDKSNRPLASTKVNKGWYLVRKGRAKLKNKYPMVIQLEKEIESDKDDESHTVCGIDDGSAYVGLAIVQKCPTKNKVVFKGTIEQRQDVKHLMDVRRSYRRYHRYHKRYRQARFNNRHSSKRSNRLAPSIKQKKDAILRVLYQLNKWVNIQEYYLEDVCIDIRAMTDGYKPYKWQYQKSNRLDENLRKASIIRDGCKCQECGKSNCVLEVHHIRARKYGGANTIENLITLCSGCHQKTEGREQKFEDRYFKIISSKPKRFDYAMHVMQGKSYLRRKISELGLLHLTNGGETANKRIEWNMAKSHSNDAICIADGIPDTCDIKEWIIKPMRRKSKAKTDNVLGIKHRDLVSYTPRGKSSVIGYVTALYPNSYQLSMTSHNKQYKKISARSCMLKWRFNKIYWLE

SEQ ID NO: 22093 - protein, 423 aa, Scytonema sp.
MQNYVFVVDTNKQPLNPVPPARARELLTKQKAAVLRMYPFTIILKHAVENANPRPLTLKFDPGSKFTGIAILDGEDVIWAAELEHRGWQIKNALESRRSLRRSRRNRKTRYREPRFDNRKRKEEWLPPSLMHRVLTIEIWAKRLCRYAPITQLLMELVKFDTQAMQNPEIDGVEYQQGELAGYEVREYLLEKWRRKCAYCDKEGVPLQVEHIDPRSKGGSNRVSNLTISCERCNTKKGVKLIDEFLKKDPVRLMRIKRHAKQPLKDAAVVNAIRWALFRTLKNILPTATGTGGQTKYNRTRLEFPKEHWIDAACVGSVEKLNLITQQPLRIKATGWGTRQMCGTDKYGFPIRHREHKQIHFGFKTGDIVKAIVTSGKKVGEYVGRVLCRKSGSFDIVTGTGRVAGISHKYCKHIHKKDGYSYA

SEQ ID NO: 22094 - protein, 477 aa, Clostridium sp.; identical to SEQ ID NO: 3241

SEQ ID NO: 22095 - protein, 427 aa, unidentified; identical to SEQ ID NO: 5062

SEQ ID NO: 22096 - protein, 415 aa, Parasutterella sp.
LMPCSPAKARLLLKEKKAIVKRRTPFTIQLTIATGETKQPVSLGVDTGYKHVGLSASTEKAELYASEVELRQDITDLLSARRALRQSRRNRKTRYRAPRFDNRIRTKRKGWLAPSVENRIDAHLSRIEAVLRLLPVTKITVETASFDLQLLKNPDISGKEYQEGEQLGFWNIREYVLCRDGHVCQHCYGRSKDPVLNVHHLESRRTGGDSPGNLITLCETCHKALHRGEITLKAKRGQSFRTEAFMGIMRWEVLNRLKASHPELEVNNTYGYRTKHARIANDIAKSHCADAFCIAGNLGAERLGEFFFQKQTRRNNRQIHKLSILKGGIRKRNQAPFEVNGFRLFDKVACQGEEGFIFGRRSSGFFDVRKLDGTRISAGISYKKLHLLEKRRTYLTEIRKEEVLPPLPEGRGLRA

SEQ ID NO: 22097 - protein, 515 aa, Diaphorobacter sp.; identical to SEQ ID NO: 8736

SEQ ID NO: 22098 - protein, 470 aa, unidentified; identical to SEQ ID NO: 12303

SEQ ID NO: 22099 - protein, 424 aa, unidentified; identical to SEQ ID NO: 4955

SEQ ID NO: 22100 - protein, 426 aa, unidentified; identical to SEQ ID NO: 6904

SEQ ID NO: 22101 - protein, 438 aa, unidentified
LKDGKAKIVKHNPFTIQLLYDSKTNTQPIEICEDVGYNYIGISVKSQSHEYVSAQYDTLQDEKACHDSCRKLRRTRRNRLRYRKPRFDNRKRGEGWLVPSLRHKKELNVNVVKMYCAVMPITHATVEVGSFDTMLLQAIQKGESKPEGVDYQKGPRYNLATLREAVFYRDNYVCKVCGRKATEGAILHMHHMFYWKGRHGNSLDELLTVCEKCHTPANHQKSGKLYGFGENVKFADLSGAAFMNTVRWQIVNELYAAFGKDFVTVTYGAMTKEKRIALHLEKSHNNDAYAMGEFHPNCRCTFEHYEKVRRNNRILEKFYDSRYIDIRTGEIATGKELFNGRINRNHKKDSENLHKYRGKRLYKGHRALVRKKVNFNPGDLVSLNGEVLVVHGTHTNKKGAVNVEFKTPAKNGRKSANLKKLKIVKAAGSIHPAWEKVS

SEQ ID NO: 22102 - protein, 424 aa, unidentified; identical to SEQ ID NO: 3434

SEQ ID NO: 22103 - protein, 427 aa, Moorena sp.; identical to SEQ ID NO: 16540

SEQ ID NO: 22104 - protein, 406 aa, unidentified; identical to SEQ ID NO: 7798

SEQ ID NO: 22105 - protein, 431 aa, unidentified; identical to SEQ ID NO: 2933

SEQ ID NO: 22106 - protein, 399 aa, unidentified
MVYVLDKNGQPLMPTDRHRKVRLMLQSGQAKVIKRCPFTIQLNYDSGHQTQEISLGIDAGSKHIGVSTTTKIKVLYEVDVELRNDIVDLLSSRRELRRGRRNRKTRYRQAKFNNRRRGNGWLAPSIRQKIGTHLTVVENICKMLPISRIMVETASFDIQKIKNPDIQGAEYQQGDQLEFWNVREYVLFRDGHTCQCCKGKSKDKILNVHHIESRKTGYHKGAVQLPKTVKRGMRFKDAAFMGIMRWAFYEALKQQYEPVGTPVHNTYGYITKHTRIEHNLPKEHYVDARCISGNPEASSNGEYYYQKKVRCHNRQIHKLTVLKGGIRKQNQATYLVKGYRLFDKVSYQGKGYFVFGRRQSGFFDIRTLSGEKVNKGSLSCKKLKFIATRTYYLTERRAV

SEQ ID NO: 22107 - protein, 475 aa, Streptomyces sp.
MPPSDSHLVSLVFPPEPVWVRAAREAVRTLLAAADRRDLADTALLLTSEAVTNSVNACLRSGCSTPVTLFAEWTAPHVLRVLVQDEAPGLPVPRAPASEDEHGRGLARIAAFTAQAGERRGRYSVQLDHRGAVIRKKLAQRAAYRRRRRTSNLRYRAPRFNNRTRPDGWLAPSLQHRVTTTVSWVTRLSRWAPVRAVHVERVAFDTHAISAGRPLEGAEYQHGTLHGTEAREYLLAKFGRACAYCGITEVPLNIDHVHPRSRGGSDRISNLVTACIPCNETKSNRSVQEFVRDKTKLAKILAQAKAPLRDAAAVQSTRWALWRALDQMLPTHIVSGGRTKWNRTRCGLPKSHTLDALDVGKLDTVTETITPILVAGCSGRGQHQRTSPDRHGFPRRTSPRVKAVHGYATGDLVTASVPKGKYTGTHTGRVMIRTTGRFDIRTAHGLAAGIRHTNIRLLQRGDGYTYTHQPEPTCT

SEQ ID NO: 22108 - protein, 379 aa, unidentified
KLLYGSAGYKQPITLGVDAGSKHVGLSASTEKRELYREEFTPRNDVVELLSTRRQNRRSRRNRKTRYRAPRFDNRVHSKHKGWLAPSVEVKIQEHITIIKRICKILPISLVRVETAEFDTQRLKAMLAGKPLPVGTDYQLGEMYDEYNVRQYVLKRDNYTCQCCGAHTTAKKLVKLHVHHLESRKTGGNAPSNLVTLCTTCHKNLHKGKVTLDGKERGKPLRDAAFMGVMRKTLMARLKEELPIPVQGTYGYITKMRREKNDIKKSHTNDARCISKHPLAEPCSVCYRTKAIRHHNRQTHKVNFSKGGYRKRSQTPYLVEGYRLWDKVLYKGQECFVSGRRSSGSFALKKLDGTTISEGVTFKKLRLLEPATNYLIERM

SEQ ID NO: 22109 - protein, 416 aa, unidentified
MVYVLDKNGQTLMPTDRHRKVRLMLQSGQAKVIKRCPFTIQLNYDSGHQTQEISLGIDAGSKHIGVSATTKIKVLYEADVELRNDIVNLLSSRRELRRGRRNRKTRYRQAKFNNRRRGNGWLAPSIRQKIGTHLTVVENICKILPISRIMVETASFDIQKIKNPDIQGAEYQQGDQLGFWNVREYVLFRDGHTCQCCKGKSKDKILNVHHIESRKTGGNAPNNLITLCETCHTGYHKGTVQLPKAIKRGMRFKDAAFMGIMRWAFYEALKQQYEPVGTPVHNTYGYITKHTRIAYNLPKEHYVDARCISGNPEASSNGEYYYQKKVRCHNRQIHKLTVLKGGIRKQNQATYLVKGYRLFDKVSYQGKGYFVFGRRQSGFFDIRTLSGEKVNKGSLSCKKLKFIATRTYYLTERRAV

SEQ ID NO: 22110 - protein, 416 aa, unidentified
MVYVLDKNGQPLMPTDRHRKVRLMLQSGQAKVIKRCPFTIQLNYDSGHQTQEISLGIDAGSKHIGVSATTKIKVLYEADVELRNDIVDLLSSRRELRRGRRNRKTRYRQAKFNNRRRGNGWLAPSIRQKIGTHLTVVENICKILPISRIMVETASFDIQKIKNPDIQGAEYQQGDQLGFWNVREYVLFRDGHTCQCCKGKSKDKILNVHHIGSRKTGGNAPNNLITLCETCHTGYHKGTVQLPKAIKRGMRFKDAAFMGIMRWAFYEALKQQYEPVGTPVHDTYGYITKHTRIAYNLPKEHYVDARCISGNPEASSNGEYYYQKKVRCHNRQIHKLTVLKGGIRKQNQATYLVKGYRLFDKVSYQGKGYFVFGRRQSGFFDIRTLSGEKVNKGSLSCKKLKFIATRTYYLTERRAV

SEQ ID NO: 22111 - protein, 423 aa, Moorena sp.
MRVFVLNKNRQPLDPCKPARARILLSVGKAKVYRRYPFTIILTEEVKQPITHDQQLKIDPGAKISGLAIVQGKRVIWGSELTHRGFQIQEALTSRRQLRRSRRNRKTRYRKPRFLNRTRPKGWLAPSLTSRVQNILTWVKKLIRFCPITGISQELVRFDTQKLQNPELSGIEYQQGTLYGYELREYLLEKWNRKCAYCGATGTQLEIEHIKPKSKGGSNRVSNLTIACHPCNQAKSNQDIELFLSKKPSILKRILSQSLRPLADAASVNSTRCTLYYELKSIGLPVEVGSGGLTKFNRCRQNLPKTHWLDAANVGKVETLIIEVTLPLVITAKGHGTRQLCRTNKYGFPIRHCSRIKFHKGFQTGDIVRAVVTKGKNIGTYVGRVATRKSGSFNISTKSGLVQGISHKYCRFIHRKDGYAYTN

SEQ ID NO: 22112 - protein, 512 aa, unidentified
MSTVYVLNKDGKPLMPTTRCGHVRHLLKEQKARVVTSKPFTIQLLYEADDVVQSLYLGIDPGRTNIGVAVVKADGTAVFTAHLETRNKEIPKLMKKRKESRRARRTNGRRCRRQRRAKANGTISKKCVKHDTAQNGSVSKRAKDIGVIKRRLPGCEKDVLCIGIKNKEAKFSNRTRPEGWLTPTANQLLQTHINLVKKIQKFLPISDVVLEINKFAFMRLDNPNVQKWQYQQGPLYQKANLEETVSEMQEHHCLFCKKKIDHYHHVVPQHKNGSNTIDNIIGLCTQHHDLVHKDATWQKRLAKKKTGLNKKYGALSVLNQIIPALTKELSSLFPKHFFVTNGKSTYDYRAAHGVSKDHWLDAYCIACSVLPNDTCDKTINSRVPYELKQFRRHDRRALNNENMSRVYTFNGKMVATNRHKATEQTTDSLEEFRQRQPNDVCKLKVKEHHPEYRNPKRNFPGCVFLVGKHTHVMQGTSGSHNGKADGYYDTNGNSYSSGKCKFVVKNEGIVFT

SEQ ID NO: 22113 - protein, 487 aa, unidentified; identical to SEQ ID NO: 20935

SEQ ID NO: 22114 - protein, 451 aa, unidentified; identical to SEQ ID NO: 7445

SEQ ID NO: 22115 - protein, 490 aa, unidentified; identical to SEQ ID NO: 6170

SEQ ID NO: 22116 - protein, 501 aa, unidentified; identical to SEQ ID NO: 9337
  source 1..501: note = Lachnospiraceae bacterium UBA2816

SEQ ID NO: 22117 - protein, 426 aa, unidentified
MSNSSNYVFVLDGSKKPLTPCKPAMARSLLKAGKAKVFKRYPFTIILNKLVDEENQGLQLKIDPGSKQTGFALVTQSEEVIFAMVLIHRGQQIKNALERRRTLRRGRRYRKTRYRKCRFFNRKRKKGWLPPSLRHRVLTVETWVNRLSKLSPVSSLAIELVKFDTQKIQNPEISGVEYQKGELFGYDVREYLLEKWGRSCAYCGATDTPLEIEHIVPRSKGGSNRVSNLAIACHQCNQNKGAMDIREFLENKPSVLTRVLKVAKTPLKDAAAVNSTRTSIFETLKAKGLPMITGSGAGTKYNRRQLNLPKEHWIDAACIGEVEKLTILTNQPLVATAMGHGCRQMVQMDKYGFPRKGYKAKKPVPGWKTGDIINVVKGKNAGLKGVRIKTVRTKGNFDIRDGDKILSVSRNHIQPVHRRDGYNYSF

SEQ ID NO: 22118 - protein, 493 aa, unidentified; identical to SEQ ID NO: 20007

SEQ ID NO: 22119 - protein, 403 aa, unidentified
LAKVVKRCPFTIQLLYQSTKEIQPVSLGVDAGSKHIGMAATTEKKVVYQEELSARNDVVKLLSARRTLRRTRRNRKTRYRKPRFNNRVHSKHKGWLAPSVEVKIQEHITTIKRICQILPISEIQVETAEFDLQRLKAMEEGRTPPVGTDYQLGEQYDFYNTRQYVLHRDGYTCQCCGTHDNNIKLHVHHIESRQTGGDAPNNLIILCEHCHKALHEGKLELPKGKKRGKSYRDATFMGVMRKTLLERLKKEIDVPVEGTYGYITKYWRERAGLEKSHIHDAVCISQYPYAKPLDIYYLTKTVRHHNRQIHKSNFSKGGIRKRNQAPYLVKGFRLFDKVLYQGKEYFIFGRRATGYFDIRTLDGTKVNKGSISYKKLRIQDTAKAYLKEARAIPHMNKFTCVLA

SEQ ID NO: 22120 - protein, 433 aa, unidentified
VKTPSNIGEGSVPRSADREETNLRVFVLNKRGKPLMPCSAAKARILLKEKKAKVKRRTPFTIQLTIATGETTQPVNLGVDAGYEHIGLSASTEKAELYASEIELRQDISELLAARRALRGARRSRKTRYRAPRFDNRKRDKGWLAPSVENRIGAHVSRVVAVLRILPVTKIIVETASFDVQRLKHPDIQGVEYQEGEQLGFWNVREYVLFRDGHECQHCHGKSKDKVLNVHHIESRRTGGDAPNNLITLCETCHKAFHRGEIELKVKRGRSFQAETFMGVMRWSFFERLRASHPEIEVRNTYGYLTKDTRIANKIEKTHCADAFCIAGNLKAKRLGYYFFQKQTRRHNRQIHKLTILKGGVRKRHQTPYEIKGFRLYDKVLYRGKEAFIFGRRSSGYFDIRTLDGERISAAVNSKKLRLLEKRRTFLIELRRN

SEQ ID NO: 22121 - protein, 512 aa, unidentified
MSTVYVLNKDGKPLMPTTRGGHVRHLLKEQKARVVRAKPFTIQLLYETNDVVQPLYLGIDPGRTNIGVAVVKANGTAVFTAHLETRNKEIPKLMQDRKKARRARRTNGRRCRRQRRAKANGTISKKCVKQTTAQNGSVSKRAKDIGVIKRCLPGCEKDVLCIGIKNKETKFTNRTRPEGWLTPTANQLLQTHINLVKKIQKFLPISDVVLEVNKFAFMRLDNPNIQKWQYQQGPLYKKESLESAVSEIQEHHCLFCDKPIDHYHHVVPQHKNGSNTIGNIVGLCAKHHDLVHKDSAWEKKLAKKSTGLYKKYGALGVLNQIIPTLTNELSSLFPKHSFVTNGKSTYDYRAAHGVSKDHWLDAYCIACSVLPSNVCDSNINNHMPYVLKQFRRHDRRVLNNENMNRVYTLNNKAVAINRHKAKDQKTVSLEEFRKEHPDDVCKLKVKEHHPTYRNMNRNFPGSVFLVGKQIHVMQGIASSKDGKATKYNDTSATAIAAGKCKFVAKNTGILFV

SEQ ID NO: 22122 - protein, 420 aa, unidentified
MQYVYVLNRHGEPLMPCSPGKARLLLKQQKACVVKRTPFTIKLLYGSAGYKQPITLGVDAGSKHVGLSASTEKRELYSEEFTPRSDVVKLLSTRKQNRRSRRNRKTRYRAPRFDNRVHSKHKGWLAPSVEVKIQEHITVIKHICKILPISLVRVETAEFDTQRLKAMLEGKPLPVGTDYQLGEMYDEYNVRQYVLKRDHYTCQCCGAHNTAEKVVKLHVHHLESRKTGGNAPSNLVTLCTTCHKNLHKGKVTLDGKERGKPLRDAAFMGIMRKTLMARLKEELPIPVQGTYGYITKMRREQNDIKKSHTNDARCISKHPLAEPCSVCYRTKAIRHHNRQTHKANFSKKGIRKRSQMPYLVEGLRLWDKVLYKGQECFVSGRRSSGKFALKKLDGTTISEGVTFKKLRLLEPATNYLIERM

SEQ ID NO: 22123 - protein, 443 aa, unidentified; identical to SEQ ID NO: 11672

SEQ ID NO: 22124 - protein, 400 aa, unidentified
MVYVQDIDGKPMMPTTRHGKVRRLLKANKATVVNLCPFTIQLTYKSTDHKQPVTLGIDAGAKHIGFSATTEKEELFACETTLRTDIVDLLSMRLQNRRTRRSRLRYRKSRFNNRGSSKKKGWVAPSVKQRIDSHLNEVNEIHKILPITKIVIEVAQFDTQKMKNHDISGADYQNGEQLGFWNVRKPQGHDTAAGKSKDPVLNVHHLESRKTGGDSPSNLITLCESCHKAFHKGEIELKKKRGKSLRDAAVMGIMKWKLYEELKSRYDNVSMTFGYITKHNRIKYGIEKNHTSDAFVISRNFNAKRIEYQYLKRLVRRHNRQIHKMKILKGGKKKNNQAPFEVFGFRLFDKVLYNNEIFFVYGRRKSGNFNIRDFNGENPKDVSHKKFKLIRGKRHPIILK

SEQ ID NO: 22125 - protein, 477 aa, unidentified; identical to SEQ ID NO: 20932

SEQ ID NO: 22126 - protein, 557 aa, Ruminococcus sp.; identical to SEQ ID NO: 18571

SEQ ID NO: 22127 - protein, 414 aa, unidentified; identical to SEQ ID NO: 4252

SEQ ID NO: 22128 - protein, 404 aa, unidentified
LMPCSPGKARLLLKQQKACVVKRTPFTIKLLHGSAGYKQPVTLGVDAGSKHVGLSASTETHELYCEEFTPRNDVVELLSTRRQNRRSRRNRKTRYRAPRFNNRVHSKHKGWLAPSVEVKIQEHITVIKRICRILPVTLVRVETAEFDTQRLKAMLAGKPLPVGTDYQLGEMYDEYNVRQYVLKRDNYTCQCCGAHTTAKKAVKLHVHHLESRKVGGNAPSNLITLCIACHNNLHKGKVTLDGKKRGKTLRDAAFMGIMRNTLLIRLRNELNIPVQNTYGYITKLLREQNDIKKSHINDARCISKHPLAVPCSVCYCTKAIRHHNRQIYKAKILKGGVRKANQATYIVKGFRLWDKVLYNGQECFISGRRSSGYFALKKLDGTTITNSISFKKIAAIRACNKLLN

SEQ ID NO: 22129 - protein, 415 aa, unidentified
MTSNINNQFSFVIDNKGNKLSPCKINKAWYLIRKGKAIQVNKYPMIIQLKREIKDKEDKSEFISGIDDGSVHVGIAIVQKCKTKNKVIFKGTIELRQDVKHLIDVRRGYRRYKRSHKRYRPARFNNRSSSKKNNRIVPSILQKRQSTLRVINRLNKYVNITEYHLEDVAIDIRALTEGHKLYRWQYQKSNRLDENIRKAVILRDDCKCMECSKSNYKLEVHHITPKRLHGSNTLNNLITLCSSCHQKTEGKEELFIKHYQDMIKGKNIRFDYAQHVMQGKNYLRNELSKLGKLVLTTGGDTANKRINWNIEKSHSNDAIVITDLFVNQNDCNIKDWIIKPMRRQSKGNIKELNGFKYRDLIRYTKRNGESYIGYITSLMPEKKQLSFTTVEGKILKRYGIKSCKLLWRFNKIYWF

SEQ ID NO: 22130 - protein, 426 aa, unidentified
AAVIETRNKEIKKLMADRQKSRQASRRGERKARQRLAKRYGSMVKSGMVMRKLPMYAADRFVTCKFIRNTQARFCNRKRCPDWITPTVQHLVQTHLNIIRKISRYLPVTDIAFEVNRFAFMHMENPEAMGVDFQNGPLKGYGDVKEAIRTQQHGKCLMCKKPISHFHHIVPRSRGGSDTIQNLAGLCPECHTKVHTDTAFRKDFDEKKSGQLKKYGALSALNQAVPFICKKLLKEYGEEHVHFCRGLDTSLIRTALGFEKTKKNQMHEVDAYCIGLAALEVNEVETPAFDHTFQIRQFRRQDRSIIHHQTGRSYYQGKEKVTQNRKPGFEQKTTALSQWYKEQVRIHGEKEAEKLRSQLRVEKSCRHYNDMDRFLPGAVFLYEGKRYVLSGRITNGKYLRACGQGMKNFPAAECTFIRHNAGLVFI

SEQ ID NO: 22131 - protein, 424 aa, Anabaena sp.; identical to SEQ ID NO: 17068

SEQ ID NO: 22132 - protein, 499 aa, unidentified
MRYVYVLDVDGKPLMPTCRFGKVRRMLKSGQAKAVDTLPFTIQLTYKPRTRILQPVTLGQDPGRTNIGMAAVRFDGKELGRFHCLTRNKEIPKLMADRMATRRASRRGERLARKRLARKLHTTAKHLEGRMLPGCSEPIAVKDIINTESRFNNRLRPEGWLTPTATQLLRTHINLFRKLSGILPVTDVTVELNKFAFIQLDNPEMKKREIDFCHGPLCGTGGLEAAVKEQQDGKCLLCGKESIGHYHHIVPRSRRGSNTIANIAGLCPKCHELVHKDADTAERLTEMKTGLTKKYGGTSVLNQIIPKLVETLADLFPGHFHVTNGWNTKEFREKHHLEKDHDVDAYCIACSHLKPEETLVETEPFEILQFRKHNRAIIHHQTERTYKLDGVTVAKNRKKRMEQKTDSLEDWYVDMAKEHGKTQADAMRSRLAVIKSTRYYNTPGRMMPGTVFLYEGKRYVMTGQITNGKYYRAYDQEKRNFPAVKVRILTKNTGLVFVA

SEQ ID NO: 22133 - protein, 436 aa, Leptolyngbya sp.
SKTNYVFVLDTNRQPLAPCHPARARELLAKGKAAVFRRYPFAIVLNRAVGDVPPESQLKIDPGSQTTGLAVVNGDKLVWGAELQHRGDRIQAKLETRRVCRRNRRNRQTRYRKPRFLNRTRPKGWLPPSLNHRVETTLTWVNRLRKLCPIASISQELVRFDTQKLQNPEISGASYQQGELFGYEVREFLLEKWGRKCAYCRAENVPLEVEHIVPKSKGGSDRVSNLTLSCRPCNQSKGNRDVREFLSGKPSVLERILRQAKTPLKNAAAVNATRWKLYQRLKETGLPVEVGTGGQTKFNRTRLEFPKAHWLDAACVGKTPSLHLATETPMAIASKGHSTRFRTLIDRYGFPRAVRKTKAQVNGLQAGDIVRAIVPNGKYRGQWTGAIAGVRKKRPPALRPFGKKQIDLTAKTQIQIVHKQDGYEYNINPCGHSSRR

SEQ ID NO: 22134 - protein, 398 aa, unidentified
VKKRTPFTIQLIYGSSGYTQEVILGVDAGSKTIGMSVSTTKEELLSAEVKPRNDVVDLLSTRREFRRARRNRKTRYRKPRFDNRVRSKHKGWLAPSVEVKIQEHITAIRRVCGILPVSKVVIETAEFDLQLLKAIADGKPVPQGEDYQQGEMYGHYNVRQYVLWRDGYTCQCCGAHATKKKEVRLHVHHLESRKVGGDAPDNQVTLCESCHEKLHKGLIAEKDFKKRKRKSTRDATFMGIMRKTLMQRLCSELPIPVIETRGYITKATREKLLVLPKSHTNDALAIAQGKQGFNVGYLPGIVQINKIYTIRPVRHHNRQLHKATILKGGIRKSNQTEKYVFGYCLFDKVQFNGQDCFIWGRRTTGIFTIKTINGKMIKDGISFKKLKLVEKSTSYLIA

SEQ ID NO: 22135 - protein, 384 aa, unidentified
MLVYVLSKNGQPLMPTHRCGFVRRLLNSQKAKVVRRCPFTIQLQYDTDCKTQPVTLGIDAGSKHIGVSATTESKVLYEADIELRNDIVDLLATRRQMRRARRSRKTRYRKARFDNRKRNDKWLAPSIQHKVNCHLEAVRFVHKLLPISKIIVEVASFDIQKIKNPLITSTDYQNGELLDWKNVREYVLFRDSHICQCCKGKSKDPVLQVHHIESRKTGGNAPNNLITLCKTCHNGYHHGTVKLPAKIKRGMKFNDATFMGIMRWGFYNQLKSLYPDVSLTYGYITKDIRISNGLAKTHFIDARCISGNPLATSDNTVYFLKKRRRHNRQIHKFNILKGGRKKRNQAAYLVKGYRLFDKVNYNRKEYFIFGRRASGFFDIRTLSG

SEQ ID NO: 22136 - protein, 393 aa, unidentified; identical to SEQ ID NO: 5287

SEQ ID NO: 22137 - protein, 457 aa, unidentified; identical to SEQ ID NO: 12656

SEQ ID NO: 22138 - protein, 431 aa, unidentified
MPNKVYVINKHGRPLMPCSPAKARHLLDEGKAKVKKRTPFTIQLVYGSSGYTQEVILGVDAGSKTIGMSASTTKEELLSAEVKPRNDVVDLLSTRREFRRARRNRKTRYRKPRFDNRVRSKHKGWLAPSVEVKIQEHITAIRRVCGILPVSKVVIETAEFDLQLLKAIADGKPVPQGEDYQQGEMYGHYNVRQYVLWRDGYTCQCCGAHATKKKEVRLHVHHLESRKVGGDAPDNQVTLCESCHEKLHKGLIAEKDFKKRKRRSTRDATFMGIMRKTLMQRLCSELPIPVIETRGYITKATREKLLVLPKSHTNDALAIAQGKQGFNVGYLPGIVQINKIYTIRPVRHHNRQLHKATILKGGIRKSNQTEKYVFGYRLFDKVQFNGQDCFIWGRRTTGIFTIKTINGKMIKDGISFKKLKLAEKSTSYLIA

SEQ ID NO: 22139 - protein, 531 aa, unidentified; identical to SEQ ID NO: 16523

SEQ ID NO: 22140 - protein, 490 aa, unidentified; identical to SEQ ID NO: 6170

SEQ ID NO: 22141 - protein, 439 aa, unidentified
LPQMKGKNMVITLDKNKRPLGFMSERRCRILLEKKRAVLYRYFPTIVILKDVDARKLSGLSSYRIKIDPGAKYTGIAIVMDDTNEFMYAMQIEHRGEQIKKNLDTRRGARRNRRSRETGYRRPKWGNRYTAKEQRQSYDSRRDENWLPPSVKSTADNIISRIRRLCRWINITNCSIESVRFDTQLMENPEIEGVEYQQGTLYGYEVKEYLLEKYGHTCQYCGGKSSDPILEWEHMIPRSRGGSDRLKNAALACHNCNQDKGNHTLEEWQTILQDRIPKERGKQKELDQIRQKFVQQVMEGKTPLKGLRYAAWVNSSRRYSQRHLYLRFPELECSSGGRTKYNRNVLKYPKEHHYDALCVGEITEDGFVDRTNGYYLYAKATGRGTRLRGQINQCGVITHKWRDRSKTAFGFQTGDLVVANVPKDTKYKYKGRFVGRVMI

SEQ ID NO: 22142 - protein, 470 aa, unidentified; identical to SEQ ID NO: 15795

SEQ ID NO: 22143 - protein, 515 aa, unidentified; identical to SEQ ID NO: 6759

SEQ ID NO: 22144 - protein, 281 aa, unidentified
SKVVIETAEFDLQLLKAIEEGKPVPQGEDYQQGEMYGHYNVRQYVLWRDGYTCQCCGAHATKKKEVRLHVHHLESRKVGGDAPDNQVTLCESCHEKLHKGLIAEKDFKKRKRRSTRDATFMGIMRKTLMQRLCSELPIPVIETRGYITKATREKLLVLPKSHTNDALAIAQGKQGFNVGYLPGIVQINKIYTIRPVRHHNRQLHKATILKGGIRKSNQTEKYVFGYRLFDKVQFNGQDCFIWGRRTTGIFTIKTINGKMIKDGISFKKLKLVEKSTSYLIA

SEQ ID NO: 22145 - protein, 452 aa, unidentified; identical to SEQ ID NO: 6924

SEQ ID NO: 22146 - protein, 393 aa, unidentified; identical to SEQ ID NO: 5287

SEQ ID NO: 22147 - protein, 417 aa, unidentified; identical to SEQ ID NO: 6193

SEQ ID NO: 22148 - protein, 430 aa, Desulfobacter sp.
LSVFVLDTNKKPQNPVHPAKARLLLTEGKASVFRQFPFTIILKETVLDVASNPLRIKIDPGSRETGIAVINDDTGEIVFAMELRHRGRQIKNNLESRRAIRRSRRNRKTRYRKPRFDNRTRAKGWLPPSLKSRVHNIETWVNRLCRFCNIQAISMELVRFDMQKIQNPEISGVEYQQGELMGYEVREYLLEKWDRTCAYCGKTDIPLEIEHIVPKSKGGSNRVSNLTLACTACNRKKGNKPLELFLSRKPRMLKRIQKQSKVPLKDAGAVNTTRWDLFRTLKETGLPVETGSGGLTKFNRTTRGLYKTHWLDAAYVGKSTPEKMFQIDKTVLIVKADGHGSRQMCRVNKFGFPRTTAKSTEKKVKGFQTGDIVKAVVTSGKKVGTYIGRVAVRKSGSFNIKTVDKTVQGISWKYCRLLHASDGYSYNTTC

SEQ ID NO: 22149 - protein, 507 aa, unidentified
MSEYIYVIGMDGDPQMPTKRKRHVEKLLQTGRARVFRQVPYTIQLTYKNQPVLQPVTIAEDPGRSNIGMAVVSLSGELLSAAVVQTRNKEIVKLMEKRKLHRRASRNGERRARQRLAKRCHTMLKAGFLMRKLPMYRKDKRVKCLVISNTEARFCNRKREDGWLTPSAEHLVRTHINLIHKMQKFLPITDVAIEINRFAFLSLEDPSISGVDFQKGPLKGYDDLNAAVEDLQDGHCLMCNSPIEHRHHIVPRSMQGSNTIGNIAGLCCKCHERVHKDARFEDRLKKKKAGLDKRYAAVSALNQAIPFICKRLEQEFGKEHVHYCSGRDTAMARRSFGYHKTKEEQLHVVDAWCIAVLSLRQIPEKAPEFDHVHEILQFRRQDRSRIKAQTSRAYYYEGKKIAKNRKKAEGQREDSLQEWRKRQVERYGKEQTRKMISQLEVKESIRRYNRLDRLMPGAVFYYQGVRYVMRGQHSNGQYLQAVGMGSKDFPAKKCKIVANNEGLVFVS

SEQ ID NO: 22150 - protein, 432 aa, unidentified
MQPTKQQNWVFQINGDKQPLDMINPGRCRELQNRGKLASFRRFPYVVIQQQTIENPQTKEYILKIDPGSQWTGFAIQCGNDILFRAELNHRGEAIKFDLVKRAGFRRGRRSRNLRYRKKRLNRAKPEGWLAPSIRHRVLTVETWIKRFMRYCPIAWIEIEQIRFDTQKLANPEIDGVEYQQGELQGYEVREYLLQKWGRKCAYCGTENVPLEVEHIQSKSKGGSSRIGNLTLACHVCNVKKGNLDVRDFLAKSPDILNQVLENSTKPLKDAAAVNSTRYAIVKMAKSICENVKCSSGARTKMNRVRQGLEKTHSLDAACVGESGASIRVLTDRPLLITCKGHGSRQSIRVNASGFPAVKNAKTVFTHIAAGDVVRFTIGKDRKKAQAGTYTARVKTPTPKGFEVLIDGARISLSTMSNVVFVHRSDGYGYEL

SEQ ID NO: 22151 - protein, 415 aa, unidentified
MVYVLANDGQPLMPTERHGKVCRMLKSGMAKVVKKCPFTIQLQYESERNVQPVSLGVDAGSKHIGISATTKTKVLYESDVELRDDIVKLLATRRQLRRSRRSRKTRYRPVRFDNRKRKEGWLAPSIRQKIESHLTVVANVCKILPINQIIVETASFDIQKIKDPEIQGIEYQQGEQMDFWNIREYVLFRDGHICQCCKGRSKDKILNVHHIESRKTGGNAPNNLITLCETCHKGYHNGTVTLPKNIKRGMKFKDAAFMGIMRWTFYNTLKEQYEPDIPVSMTYGYLTKNTRIEHGLPKEHYIDARCISGNPDAVSDGTYYYQKKVRCHNRQIHIQTILKGGIRKSNQAEYLVKGYRLFDKVRYQGREYFIFGRRKSGFFDIRTLSGEKVNKGSINVKRLTFVDTRKNYLTERRTV

SEQ ID NO: 22152 - protein, 512 aa, unidentified
MSTVYVLNKDGKTLMPTTRCGHVRHLLKKQKARVVTSNPFTIQLLYETDDVVQPLYLGIDPGRTNIGVAVVKADGTAVFTAHLETRNKGIPKLMKKRKDSRRARRTNGRRCRRQRRAKANGTISKKCVKQATAQNGSASKRAKKIGVIKRHLPGCEKEVLCIGIKNKEAKFNNRTRPAGWLTPTANQLLQTHINLIKKIQKLLPISDVVLEINKFAFMQLDNPNIQKWQYQQGPLYQKANLEEAVSEMQEHHCLFCKKKIDHYHHVVPQHKNGSNTIDNIVGLCTKHHDLVHKDTAWYEKLTKKKTGLNKKYGALSVLNQIIPALTKGLSSLFQKHFFVTTGKSTYDYRAAHGVSKDHWLDAYCIACSVLPNDVCDSNINSHVPYELKQFRRHDRRALHKENMNRVYTLNGKKVATNRHKAIEQTTDSLEEFRQNHPDDVCKLKVKEHHPEYRNPKRNFPGCVFLVGKRTHVMQGTSGSHNGKADGYYDTNGNSYPSGKCKFVAKNKGIVFA

SEQ ID NO: 22153 - protein, 467 aa, unidentified
VSYCKPLINIGKGVIYSSICTDLSLQTYQKRKEVPCMVYVLDIDGQPLMPTSRHGKVRRLLNSHLAKVAKRCPFTIQLLYQSTKETQPVSLGVDAGSRHIGLAATTEQKVVYQEELVPRNDVVKLLSARRALRSSRRSRKTRYRKPRFNNRVHSKHKGWLAPSVEVKIQEHITAIKRICQILPISEIHVETAEFDLQRLKAMEEGRPLPVGTDYQLGEQYDFYNTRQYVLHRDEYTCQCCGTHDNNVKLHVHHIESRQTGGDAPNNLITLCEHCHKLLHAGKTILPKGKKRGKSYRDATFMGIMRKTLLERLKKEIDVPVEGTYGYITKYWRERAGLEKSHINDAICISKHPYARPLETYYLTKAVRHHNRQIHKTKFSKGGIRKRNQAPYLVKGFRLFDKVLYQGESYFIFGRRITGYFDIRTLDGTKVNKGSTSYKKLRIQDTAEAYLTEVRAIPHMNEFTCVLA

SEQ ID NO: 22154 - protein, 423 aa, unidentified; identical to SEQ ID NO: 3951

SEQ ID NO: 22155 - protein, 458 aa, Scytonema sp.; identical to SEQ ID NO: 17469

SEQ ID NO: 22156 - protein, 418 aa, unidentified
MPCSPAKARLLLKEKKAIVVRRTPFTIQLTIATGEAKQPVSLGVDAGYKHVGLSASTEKAELYASEVELRQDVSDLLSARRALRQCRRNRKTRYRAPRFDNRIRTKRKGRLAPSVENRVNAHLSRIEAVLRLLPITKITVETASFDTQLLKNSDIAGKEYQKGEQLGFWNIREYVLFRDGHVCQHCHGRSKDPVLNVHHLESRRTGGNSPGNLITLCETCHKALHRGDITLKAKRGKSFRAEAFMGIMRWEVHNRLRALHPGIEVSNTYGYRTKHARIANGIAKSHCADAFCIAGNLGAERLCEFFFQKQTRRNHRQIHKLSILKGGIRKRNQAPFEVKGFRLFDKVACQGEEGFIFGRRSSGFFDVRKLDGTRISAGISCKKLHLLEKRRTYLTEIRKEEALPPLPEGRGSAPKCDE

SEQ ID NO: 22157 - protein, 440 aa, unidentified
LVFVLNKNKKPLNPCHFAVARKLLKQGKAVVHKQFPFTIRLKDLKEVNPKGLIIKLDPGAKQTGVALHKFNGEVILLATIEHRADKIKQNLEARRAFRRTRRNRKTRYRVPRFLNRKRPEGWLPPSIQSVVDNVKNFIIKLKKLCYIDTIYIETVRFDTQLMLNPSIEGVDYQQGTLLGYEIREYLLYTYGHTCQYCKGLTKDTKLEIEHKHPKSRGGSNSIRNLTLACRTCNQEKGNNTLDEWVQSLSKSKLDKERVKNISLILKTNKPINLKDTAKVNSSRNAILREMYKLTSNVVVSTGGVTKHNRVKSNLPKTHYYDALCVKETPKIKIHKGLKELYIKSIGRGTRSRTLLNKYGFPRAYLPRQKQFFGYQSGDMVKANIPKGKYMGQYVSNVSCRSTGTFAIYSKKHGKQIDVNHKYLKLIQKGDGYRYELKTLA

SEQ ID NO: 22158 - protein, 470 aa, unidentified
MSVFVVGLNGCRLMPTSERKARLLLKQGKAFVEQKVPFTIRLNYKTGSTTQLGYLGIDTESQHIGVSVVREDGTVLHKEEIGLRDSMSKRKLLEAKASLRRGRRYRKTRYRHPKWRPKTKRVYCEVPDRKGRHWQKKKITFTSKRPKGWLPPSLQSKTDHHIRWIKKLQDLLPEGYRLSIELGRFDPARMKNPEIHGDLYQKGPQYDYENVRAYVLDRDRYTCQICKKKGGKLHVHHILYRSHGATDDPQYMVTVCSDCHSAQNHLPGGILYQWMQEQKRFSRGLRDATFMNILRKRLIRAFPEAVFTYGNVTKVDREKLKLPKSHGNDATAIALVKTGITAVKDKESVICIQQVRRKKRSLHEETPRKGRKEPNRTAARNNKNTKAVTVTKRQNKKKVSMTGCLFDRVELNGKKGWISGFTGKSCYVKDADDQYLSTSPKYKQVSLSKLRILHHCGNWIIGAKKTLGKG

SEQ ID NO: 22159 - protein, 413 aa, unidentified
MVYVLNENGQPLIPTENHAKVRVLLKQGKAKVVNNCPFTIQLLYSSTNYTQPVTLGVDAGSKHIGLSATTEDRELYAADVELRNDIVKLLAARRASRRSRRNRKTRYRKPRFNNRKRDKGWLAPSIREKIGTHLKVVDDTCKLLPVSKIIVETASFDIQKIKNPDVKSTDYQQGEQLGFWNVREYVLFRDGHKCQCCKGKSKDKILNVHHIESRQTGGNAPNNLITLCETCHTGYHKGTVKLPAKIKRGMKFKDAAFMGIMRWAFYGELKKRYPDVSLTYGYITKNTRIENGLPKEHYVDARCISGHPSAKPLGTVFYIKKVRCHNRQIHKLKILKKGVRKRNQAEYEVYGFRLYDKVSWKGRICFVFGRRSTGRMDLRLLDGTHVNASVSYKNIKLLRMRSNYLIEVKNAIG

SEQ ID NO: 22160 - protein, 416 aa, Anoxybacillus sp.; identical to SEQ ID NO: 21262

SEQ ID NO: 22161 - protein, 483 aa, unidentified
MSVFVVGLNGCRLMPTSERKARLLLKQGKAFVEQKVPFTIRLNYKTGSTTQLGYLGIDTGSQHIGVSVVREDGTVLHKEEIGLRDSMSKRKLLEAKASLRRGRRYRKTRYRHPKWRPKTKRVYCEVPDRKGRHWQKKKITFTSKRPKGWLPPSLQSKTDHHIRWIKKLQDLLPEGYRLSIELGRFDPARMKNPEIHGDLYQKGPQYDYENVRAYVLDRDRYTCQICKKKGGKLHVHHILYRSHGATDDPQYMVTVCSDCHSAQNHLPGGILYQWMQEQKRFSRGLRDATFMNILRKRLIRAFPEAVFTYGNVTKVDREKLKLPKSHGNDATAIALVKTGITAVKDKESVICIQQVRRKKRSLHEETPRKGRKEPNRTAARNNKNTKAVTVTKRQNKNTKAVTVTKRQNKKKVSMTGCLFDRVELNGKKGWISGFTGKSCYVKDADDQYLSTSPKYKQVSLSKLRILHHCGNWIIGAKKTLGKG

SEQ ID NO: 22162 - protein, 414 aa, unidentified; identical to SEQ ID NO: 6490
  source 1..414: note = Lachnospiraceae bacterium UBA3226

SEQ ID NO: 22163 - protein, 420 aa, unidentified; identical to SEQ ID NO: 18438

SEQ ID NO: 22164 - protein, 470 aa, unidentified; identical to SEQ ID NO: 2825

SEQ ID NO: 22165 - protein, 418 aa, unidentified; identical to SEQ ID NO: 15678

SEQ ID NO: 22166 - protein, 415 aa, unidentified; identical to SEQ ID NO: 3635

SEQ ID NO: 22167 - protein, 431 aa, unidentified; identical to SEQ ID NO: 4463

SEQ ID NO: 22168 - protein, 415 aa, unidentified; identical to SEQ ID NO: 10904

SEQ ID NO: 22169 - protein, 427 aa, unidentified
MVFVLDTKKKPLMPCTPKRARQLLARGRAVVHRVAPFVIRLKDRQVEDSVLQPLALKIDPGSQTTGMTLARVEDRSEGAIHHAVLLAEVQHRGHEVRARKVTQRHARRRRRSANLRHRAARAANRRIARGWLPPSLLSRIGNVVSWTKRLRRFAPVTRVDVECVRFDTQLLQNPEITGVQYQHGELFGWEIRAYLLLKYAYQCVYCGKRDTPFELDHIRPRSRGGSSRITNLALACHDCNRQKGAQTAAEWGHPEVEVQAQTPLRDAAAVNATRHKLVEELGVFGLPVGTWTGGRTRWNRARFGIAKTHAKDALCVGDLAGVREGRLKTVAITATGRGEHCRTNWSKQGFPRGYRLRHKQVKGFKTGDRVRAVVPDKLKTRGIHVGRVQVRKSGSFDIQTHEREVEGVNATYCCLVQRGDGYAYALA

SEQ ID NO: 22170 - protein, 427 aa, Akkermansia sp.
LRVFLLNKRGKPLMPCSPAKARLLLKEKKAIVVRRTPFTIQLTIATGESKQPVSLGVDAGYKHVGLSASTEKAELYASEVELRPDVSDLLSARRTLRQSRRNRKTRYRAPRFDNRIRTKRKGWLAPSVENRINAHLSRIGAILRLLPVTKITVETASFDTQLLKNPDISGKEYQEGEQLGFWNVREYVLFRDGHACQHCHGRSKDPVLNVHHLESRRTGGDSPGNLLTLCETCHKALHRREIKLKTKRGQSFRAEAFMGIMRWEVLNRLKASHPELEVHNTYGYRTKHTRIVNGIDKSHCADAFCIAGNLGAKRLGEFFFQKQTRRNNRQIHKLSILKHGLRKRNQAPFEVKGFRLFDKVVCQGEEGFIFGRRSSGSFDVRKLDGTRISAGISYKKLRLLEKRRTYLKEIRKEEALPPLPEGRSLRA

SEQ ID NO: 22171 - protein, 424 aa, unidentified; identical to SEQ ID NO: 13447

SEQ ID NO: 22172 - protein, 420 aa, unidentified
MQYVYVLNMHGEPLMPCSPRKARLLLKEGKARVVKRTPFTIKLLYGSAGYKQPITLGVDAGSKHVGLSASTEKRELYSEEFTPRNDVVELLSTRRQNRRSRRNRKTRYRAPRFDNRVQSKHKGWLAPSVEVKIQEHITVIKHICRILPVTLVRVETAEFDTQRLKAMLAGKPLPVGTDYQLGEMYDEYNVRQYVLKRDNYTCQCCGAHTTAKKTVKLHVHHLESRKIGGNAPSNLITLCITCHDALHKGKVSLDGKERGKTLRDAAFMGIMRNTLLERLRNELHIPVQNTYGYITKLLREQNDIEKSHVNDARCISKHPLAEPCSVCYRTKAIRHHNRQTHKANFSKGGIRKRSQMPYVVEGYRLWDKVLYKGQECFVSGRRASGSFALRKLDGTVVTSGITFKKLQLLEPATNYLIERM

SEQ ID NO: 22173 - protein, 414 aa, Eubacterium sp.
MAVAVLSSTGKKLMPTSNYHARRLLKKGRAVIVRYKPVFTIRMTDRESGETQPMEYTSDTGYIHVGISVKSQRHEFFHEERNMLSNETERHNNCRKYRWARRNRKRYRKPRFNNRSKKNKELAPSIRHKMECQIRLFDQYCEVLPITTATFEMGKFDTFLMQAAAEGKAKPEGKDYQKGDRYLTKTLRAAVFSRDHYTCQICGKSGIKDHVILHTHHIGFWKGYRSNRVGNLLTVCDKCHTAKNHKQDGKLWGLEPKGTDLAPAAYMNIVRWAMYRAVRDAHPEIEIHIQYGVQTDITRQNRNIEKSHANDAYCIGTMHPKHRCREAVYQKLRRHNRVRTKFYDAEYIDLRDGKKKNGAQLSCGVQNGKKAGGVKRTREFTAVENAEPEAAVSEEKNAKYRPETRCCLTAKSEL

SEQ ID NO: 22174 - protein, 441 aa, unidentified
ASVYRKVPFTIKLNYKTGSTVQPGYLGIDTGSQHIGVSVVQKDGTVLHKEEIGLRDSMSKRKLLESRASSRRGRRYRKTRYRHPKWKPKTKRIYNEKADRKGRHWKKQKNTFTSKRQAGWLPPSLQSKTDHHIQWIRKLLDLLPEGYRLSIELGRFDPARMKDPGIHGELYQKGPQYDYENVRAYVLARDGYTCRVCKKKGGKLHVHHILYRSRGASDNPKYMAAVCSKCHTTENHLPGGILYQWMQDQKKFTRGLRDATFMNILKKRLRRAFPDAVFTYGNITKADREKLGLPKSHGNDATAIALVKTEVKSVKDEEPVIHIQQVRRKKRSLHEETPRKGRKEPNRTASRNDKNTRSVTVSKGSGKKKVSMTACLFDRVELDGKKGWITGFTGTSCYVKDKEDNYICTSPKYKQVSISKLRILHHCGNWAIGAEKPLGKG

SEQ ID NO: 22175 - protein, 480 aa, unidentified
LYTKPLDNIGEGSLPPSGEINLKGMTFMVYVKSIDGKALMPTSNAKARKLLKQKKAKVVSLRPFVVKLTYKTKTEYIQKLNLGVDSGYSNIGFSVIDAKQEYIAGEVKLLEGMKKRLLEKASYRRIRRSRLRYRKARWNNRVKSKKKGWLAPSLKHKLDTHIKFIDYLKNILPIGKITIEVANFDIQKMKDDLISGIDYQNGDMFGFWNVREFVLHRDGHKCQNPNCKHKDKKEQILKVHHIRYRSKGGSDRPENLITLCSKCHIPANHKKGKFLYDWCVNGKKVRGFKDATFMSVIRWYLVNELKSKHNNVSITYGYITKNHRIQNGIEKSHLNDAFAITKGTNQARTKDRFLVIQDRLKNRSLEKFYDSKIIDIRTGKKVSSGDLSCGRSTRNKNLNTENLRKYRGAKISKGQRRIRKQKYFYQPNDLVKYDGKVYTVKGTQNEGKYIALKEIKKVPKVELLIPYVFKKGLNWSYGLC

SEQ ID NO: 22176 - protein, 420 aa, unidentified
MQYVYVLNKHGEPLMPCSPRKARLLLKQKKACVIKRTPFTVKLLHGSAGYKQPVTLGVDAGSKHIGISATTEKHELYREEATPRNDVVDLLSARRAFRRSRRNRKTRYRAPRFDNRVHSKHKGWLAPSVEVKIQEHITLIKHVFRILPVTLVRVETAEFDTQRLKAMLEGKPLPVGTDYQLGEMYDEYNVRQYVLKRDNYTCQCCGAHSTKTKGVKLHVHHIETRRTGGNAPNNLITLCKACHKALHAEKVTLDGKKRGRPLKDAAFMGIMRKTLMERLRKELKIPVQGTYGYITKYLREKNGIPKSHTNDARCISKNPLAIPCDTCYYTKAVRHHNRQLHKATILKGGIRKANQAPYIVKGYRLWDKVSCNGTECFITGRRTSGYFALKELDGTVVSNSISYKKLRLLEAATNYIIERK

SEQ ID NO: 22177 - protein, 414 aa, unidentified
MPCSPAKARLLLKEKKAIVKRRTPFTIQLTIATGETKQPVSLGVDAGYKHVGLSASTEKAELYASEVELRQDITDLLSARRALRQSRRNRKTRYRAPRFDNRIRTKRKGWLAPSVENRINAHLSRIEAVLRLLPVTKITVETASFDLQLLKNPDISGKEYQEGEQLGFWNIREYVLCRDGHVCQHCYGRSKDPVLNVHHLESRRTGGDSPGNLITLCETCHKALHRGEITLKAKRGQSFRAEAFMGIMRWEVLNRLKASHPELEVNNTYGYRTKHARIANDIAKSHCADAFCIAGNLGAERLGEFFFQKQTRRNNRQIHKLSILKGGIRKRNQAPFEVNGFRLFDKVACKGEEGFIFGRRSSGFFDVRKLDGTRISAGISYKKLHLLEKRRTYLTEIRKEEVLPPLPEGRGLRA

SEQ ID NO: 22178 - protein, 557 aa, unidentified; identical to SEQ ID NO: 14359

SEQ ID NO: 22179 - protein, 431 aa, unidentified
MPNKVYVINKHGRPLMPCSPAKARHLLDAGKAKVKKRTPFTIQLVYGSSGYTQEVILGVDAGSKTIGMSASTTKEELLSAEVKPRNDVVDLQSTRREFRRARRNRKTRYRKPRFDNRVRSKHKGWLAPSVEVKIQEHITSIKRVCRILPVSKVVIETAEFDLQLLKAIEEGKPVPQGEDYQQGEMYGHYNVRQYVLWRDGYTCQCCGAHATKKKEVRLHVHHLESRKVDGDAPDNQVTLCESCHEKLHKGLIAEKDFKKRKRKSTRDATFMGIMRKTLMQRLCSELPIPVIETRGYITKATREKLLVLPKSHTNDALAIAQGKQGFNVGYLPGIVQINKIYTIRPVRHHNRQLHKATILKGGIRKSNQTEKYVFGYRLFDKVQFNGQDCFIWGRRTTGIFTIKTINGKMIKDGISFKKLKLVEKSTSYLIA

SEQ ID NO: 22180 - protein, 420 aa, unidentified; identical to SEQ ID NO: 8060

SEQ ID NO: 22181 - protein, 425 aa, Nostoc sp.
MQINYVFLVDTNKQPLNPIHPARARELLNKNKAAIYRQFPFTLVLHKAIDNPVVRLLTLKLDPGSKTTGIALLDGENVIWAAELQHRGWSIKDALNSRRSLRRSRRSRKTRYRMARFDNRKRPEGWLPPSLMHRVLTVETWVKRLCRYAPIAQTVMELVKFDTQKMQNPEIDGIEYQQGQLAGYEVRQYLLEKWGRKCVYCDKEGVPLQIEHIHPKSKGGSNRVSNLALSCKRCNLKKGTQLVDEFLKKDAKRLEKIKQQVKKPLKDAAAVNATRWTLFHTLKGILPTTTGTGAQTKYNRTLFQLEKQHWIDAACIGDIKAIKLLTLQPLLIKANGWGTRQMAGTNKYGFPIRHRTRQSLHFGFQTGDIVKAVVLSGKKVGQYVGRVLCRARGSFDIVTKTGRVGDINHRFCKPIHKKDGYSYAF

SEQ ID NO: 22182 - protein, 456 aa, unidentified; identical to SEQ ID NO: 2706

SEQ ID NO: 22183 - protein, 462 aa, unidentified; identical to SEQ ID NO: 9356

SEQ ID NO: 22184 - protein, 328 aa, unidentified
MPCSPAKARLLLKERNAIVVRRTPFTIQLTIATGETKQPVSLGVDAGYKHVGLSASTEKAELYASEIELRQDITDLLSARRELRRARRNRKTRYRGPRFDNRIRTKRKGWLAPSVENRINAHLSRIEAVLRLLPVTKITVETASFDLQLLKNPDISGKEYQEGEQLGFWNIREYVLCRDGHVCQHCYGRSKDPVLNVHHLESRRTGGDSPGNLITLCETCHKALHRGEITLKAKRGQSFRAEAFMGIMRWEVLDRLKASHPELEVQNTYGYRTKHVRIANGIAKSHCADAFCIGGNLGAERLGEFFFQKQTRRNNRQIHKLSILKGAL

SEQ ID NO: 22185 - protein, 521 aa, unidentified; identical to SEQ ID NO: 11204

SEQ ID NO: 22186 - protein, 436 aa, Thermodesulfovibrio sp.
MSLGNTMYVAVLNKHGKPLMPCSPRTARVLLKQGKAKVVRCKPFTIQLLYGSSGYKQKLYAFRDRGLTQGICICREDRKVIARMEVQGRTDISERLYERRSYRRSRRYRNTGYRQCRSDNRKRREDWLPPSVERLWYEHEKVRNFLNSLFPITQWAEEVNNFDTHKMWNPEVKGEDYQNGPLKGKKDVRQYVLERDSYRCVLCGDAENLEVHHIIPRAKGGSNRPQNLVTLCANCHRKVTLGEIEIDTVIESYRWAAKLNALNSRFVALSVVKVSPKNVRQKRVELGLEKAHWADALAGITVAFGITPDLSELPPLLTGRFVRTKNRQLHCAKPVKSGYRPKAQANRYLKNKQGVRFMRYDLAKYTHNGKKIIGYLNTLRSSGMVRICDFTGRELANVSVNRLKKLQNRDSVIWEWLFLPSPKGDGSPSHDIYRKK

SEQ ID NO: 22187 - protein, 431 aa, unidentified; identical to SEQ ID NO: 2952

SEQ ID NO: 22188 - protein, 378 aa, Caldicellulosiruptor owensensis
LLVYRLCICYNICKGDDKKWQQFITIQLLHGSSGYKQKCIAGIDAGSKNIGIAVTTEDGRVIYKAQVELRQDIKENIETRRRLRRARRSRKKRYRKPRYLNRKRPEGWLPPSVRAKIEAHYNIIKRLSKIIPIAEIKVEVGQFDTQALQNPDIQGIEYQNGEMKGFDSVKEYVKIRDKFKCHYAELRPDISCSDKLTVDHIIPRSRGGTNNPSNLVCCCEAHNIAKGNMSYKEFTGKELPAIEDFRPATFMNVLRDYLVPRLMEIAPTSYTFGLYTRRTRKEWELEKSHINDAIAITGIKPKWQDDVWYCIRQVRKKKRSLHEEIPRRGRKEPNREAKRNSKNTKEIIVNGNKWCLWDKVYIPAINKTGYISGFSNNW

SEQ ID NO: 22189 - protein, 429 aa, Marinobacter sp.; identical to SEQ ID NO: 4415
  VARIANT 380: note = X can be any naturally occurring amino acid

SEQ ID NO: 22190 - protein, 512 aa, unidentified
MSTVYVLNKDGKPLMPTTRGGHVRHLLKEQKARVVRTKPFTIQLLYETDDVVQPLYLGIDPGRTNIGVAVVKADSTAVFTAHLETRNEEIPKLMQGRKKARRARRTNGRRCRRQRRAKANGTISKKCVKQTTAQNGSASKHAKEIGVIKRHLPGCEKDVLCIGIKNKEAKFSNRTRPEGWLTPTANQLLKTHINLVKKIRKFLPISDVVLEINKFAFMRLDNPNIQKWQYQQGPLYQKASLEEAVSEMQEHHCLFCKKSIAHYHHVVPQSENGSNTIGNIVGLCTKHHDFVHKDTAWQKKLAKKKTGLNKKYGALSVLNQIIPALTKELSSLFPKHFFATNGKSTHDYRIAHGVSKDHWLDAYCIACSVLPNDTCDRTINSRVPYELKQFRRHDRRALHKENMSRVYTLNGKSVATNRHKAAEQTTDSLEEFRQRQPNDVCKLKVKEHHPTYRNMNRNYPGSIFLIGKQVHVMQGIAGSKDGEATTYKDTNANSIAAGKCKFVAKNSGILFV

SEQ ID NO: 22191 - protein, 375 aa, Moorena sp.
PVIHKHQVKIDPGSKTTGLAIVQGERVIWGSELTHRGSQIRDNLISRGQLRRSRRNRKTRYRQPRFLNRTKPKGWLAPSLTSRVQNILTWVKKLIRFCPITGISQELVRFDTQKLQNPELSGIEYQQGTLYGYELREYLLEKWNRKCAYCGATGTQLEIEHIKPLSKGGSNRVSNLTIACHSCNQAKSNQDIELFLSKKPSILKRILSQSKRPLADGASVNSTRWKLYHDLKSIGLPVEVGSGGLTKFNRCRQDLPKTHWLDAANVGKVETLIIEVTKPLLITAKGHGTRQLCRTNKYGFPIRHCSRIKFHKGFQTGDIVRAVVTKGKKIGTYVGRVATRKSGSFNISTLGGLVQGISHKYCRFIHRKDGYAYTN

SEQ ID NO: 22192 - protein, 428 aa, unidentified
MQRVFVLDHNKQPLMPCHPARARKLLKKGKAAVYRRYPFTIIMTHRVGGDLQPIEVKFDPGSRTTGIALVGHFNRGLEVIWAGNLNHRGIQIKSHLESRRAIRRSRRNRKTRYRQARFLNRMRPAGWLPPSLRSRVDNVKNGMLKLSSLTPVSQIAVETVKFDMQKIQNPEISGLEYQHGELAGYEVREYLLEKWGRKCAYCGAQNVSLEIEHIRASSKGGSNRVSNLTLACNKCNQKKGNQDIKEFLKSQPDRLRKIQSQALKPLKDAAAVNATRYAISNVLKSFGLPIVFSTGGRTKFNRLKLGYQKDHWIDAACVGESGSQIVIPKTITPLTITAKGRGSRQKCSMNKYGFPRTGPKKAKRVKGFQTGDIVKAVVTKGKKIGTYFGRVAVRASGSFDIGSGEERVGSISYKYCCLLQRSDGYEYT

SEQ ID NO: 22193 - protein, 431 aa, unidentified
MCVFVLDSDRQPLDPCHPARARELLRQGRASVVRHSPCTIILHDRKREDSIVHAHRLKIDPGSKTTGLALLHGGSVFWAAELTHRGQRIKDALASRRALRRNRRQRKTRYRQPRFLNRRRPSGWLPPSLWSRVGNVMTWVERLARSCPITALSQELVRFDTQLMQNAAVSGIAYQQGELAGYEVREYLLEKWHRTCVYCGARQVPLEVEHIVPKACGGSDRISNLTLACAPCNQKKGTQTAAEFGFPQVQAQAKLPLQDTAAVNATRWALYHQLCLTGLPVECGTGGRTKDNRTRLGLHKTHWLDAACVGASTPDTLHVAGIQPLGIRAMGHGTRQMCRTDAHGFPVQHRARQKRYFGMQTGDLVKAVVPSGKYTGTWISRVVVKASGWFDLVIRGKKASVHHKHCTRLWAADGYTYSLPAVAGTAVSSPH

SEQ ID NO: 22194 - protein, 466 aa, unidentified
VRFEINWLIRGQKGDRKMQKLGERNTYTPTNASQVRSSVVVSLNREETLGEHDLKTCPNNLDGNQLSGKREQDLRVPVLNMRGKSLMPARPAKARHLLKEGKAMVVGRSPFTIQLTTATGEAKQDIALGVDCGYSHVGLSAVSRKQELFSAEVILRGDIVKLNSERRQYRRARRSRLWHRQPRFDNRKKDKGWLAPSIQHKLDSYFKLIGKIKEILPIAKINVEVAAFDIAKIKNPDIEGEGYQNGVQKNFWNTREYVLFRDNHTCQACKGKSKDPVLEVHHLESRKTGGDRPDNLIALCNTCHSKVSKGKFYLNVKIPKGFKAETFMNTVRWKLVNRLKELGNSVSHTYGYITKSKRIEIGLEKNHVNDAFVIAGGTTQERCSSFTVSQTRRNNRRLQTNRKGYRPSIRRKRYELQPNDLVRYDNTEKRVKGVFNYGTWVRLDDGVNTNVKNVEVLKYGKGIQFV

SEQ ID NO: 22195 - protein, 189 aa, unidentified; identical to SEQ ID NO: 10469

SEQ ID NO: 22196 - protein, 434 aa, Lactobacillus sp.; identical to SEQ ID NO: 10121

SEQ ID NO: 22197 - protein, 466 aa, unidentified
MKILVIGRNGLGLAPTTPRKARILLKEKRAEVAYRQPFTIRLKYKTGCAHPKMCLGEDTGSQHIGFAILTEKGQVLDKTEYELRSTMEKRSLLETRKEYRRGRRYRKVRYRHSKFHPTTKRLYVEKPIKYNKHTTHWKKQTNSFDSSRPEGWLPPSIQSKLDHHIRLTSRYKEALPPDTMIRIEVGRFDVAHMKDPTINGKMYQQGPMYESENVKAYVFARDSYTCKCCKAKAGSIRKDGTQVKLKAHHIDFRSKGATDNPERMVSVCDRCHTTAAHQLGGILYQWMIEGKKFSRGYRDPAFMNILRRRMWKAFPEAAFTYGNITAADRKGLLIEKSHANDAVAIAAHGMELIRNSTETTFYKQLRKQKRSLHEATPRKERREPNRTAKRNRKNTCVVKGWYLNDKVTVFGKTGWISGFSGKSSVYIRDCENEYITVPGKNYKLVPISQIKMITHCNNWAVYTKIA

SEQ ID NO: 22198 - protein, 431 aa, Moorena sp.; identical to SEQ ID NO: 2831

SEQ ID NO: 22199 - protein, 317 aa, Sarcina sp.
VQPVGLGVDAGSRHVGLSACTDKTELFASEVLLRGDITKLLSERRAFRHARCSRKTRYREKRFDNWVRSKHRGWLAPSVENRIHAHMRAVEDVRRILPVSRSTVETASFDLQKLKADLAGVSRPRGTDYQQGDMLGFWNASEYVLFRDGHACRCCKGKSKDQRLNVHHIESRQAGGNAPDNLVTLCKTCHDGYHKGTVKLPKDIKREAKTRDAVFMGTMRWTFYRRLKELFGPDMVHMTYGYITKNTCIRHKLKKPHSTDARCISGHPDAEPCGDIILQRKVRRHNRKLHRAKILKGGVRKPNQSRGKSSGSGCSTR

SEQ ID NO: 22200 - protein, 418 aa, unidentified; identical to SEQ ID NO: 15302

SEQ ID NO: 22201 - protein, 423 aa, unidentified
MVYVLNIDGQPLMPTDRHGKVRHLLKDGRAEVVKRCPFTIRLLYDSTHYTQDIVLGVDAGSKHIGLSGTTETKELYASDVELRNDIVDLISTRRQNRRSRRNRKIRYRKARFQNRVSGKKNWLAPSIRQKVDTHMTVVSRVCMILPVTKIIVETASFDIQKIKDPDISGTGYQQGEQLDFWNVREYVLSRDGHTCQCCKGKSKDPVLNVHHIESRKTGGDAPNNLITLCETCHKSYHSGAVQLPKAIHRGMRFKDAAFMGIMRWAFYNKLKEVYEPQDIEVSMTFGYLTKNTRIRHYLPKEHYIDARCISGHPEAIPSNEVFYQKKVRCHNRQIHKNTILKGGVRKRNQTGYLVKGFRLFDKVAYKGREYFIFGRRQSGFFDLRNLSGCKVNKGSLSYRKIGFLEPRQYYLCERRVMDTQGCA

SEQ ID NO: 22202 - protein, 442 aa, unidentified
MVYVLNKKGQPLMPTNRHGKVRRLLKTKKAKVIKSCPFTIQLLYDTANHTQDITLGVDAGSKHIGLSATTEDKVLFEADVELRNDISKLLEARYTFRHSRRNRKTRYRKKRFDNRVSSKHKGWLAPSIEHKIQSHFAMVEKLHRILPVTKIVVETASFDTQLLKAQLEGKLIPEGTDYQNGELAGWNIREYIFHRDNYTCQWCRGKSKDPVLVTHHHAYWKGDHTNKPSSLITLCNTCNDSKYHKKEANRLWGWEPKVTNSYKHAVFMGVMRWTFYNRLKEIYPNVSMTYGYITKNTRIENNLPKAHYVDARCIGGHPKAKSNGEYFYYKKVRCHNRQLHKANTLKGGIRKRNQAEYTVKGFRLFDRVEYQNNEYFVFGRRASGFFDIRTLDGQKVNKGSISFKKLKLKETSKTYLIERRMADTGVSLAPLTTEVTSLRQTG

SEQ ID NO: 22203 - protein, 449 aa, Desulfobacter sp.
MKVYVKSQSGKWLMPTNPANARILLKQGKAKVIQRTPFAIHLLYETTEHIQPVTVGIDDGGINLGIAAVSNGKVLFQQEVVLRSDVKSKLDTRRQYRKSRRNRKTRYRKSRFLNRKSSIPTCKVCGGNAPASQVICRSCLNRADGVHQKYAKIKKSVFRIPPSIKAKKDAIIRVVKQIPLPICRIVLEDLYFDFQAMENPDISGEQYQHGDLLYHKNFKQACLVRDKFRCRVCGAQTKLQCHHICAGAKGGTDKLSNLMTLCDLCHDRHHKEGLKLPKQKSSFYMSAAHVQQGKHYLQAKLSRIAPLRTTFGYITSHFRNNAGIEKSHVNDAVIIADKQASPLDRQIQTKHVQSRKRSLHEATARKGRKTPNRTQKRNNKNVFTLKDFNRWDTVQYKGRVGFISGFTGSSSCYIVDIKGNYIKNPMKTYKQVDLREISLICKNQTIISQ

SEQ ID NO: 22204 - protein, 533 aa, unidentified; identical to SEQ ID NO: 11761

SEQ ID NO: 22205 - protein, 419 aa, unidentified
MVYMISQDGKPLMPCSNSIARLLLKQSKAKVKKREPFTIKLTYETTNYTQDLTLGVDTGSGTIGTSVSKDNGDIIYMSEVVIRNDITGKMTQRAKYRRNRRNRKARYRKARWLNRANSIKNDRFSPTMQSKLHSHVKEIEYIKFILPITEMVFETGQFDTHLMKNPNLANPKIKHWGYQKGINYGFENTKAMVLNRDNYTCQYYKGKHKDSKLEVHHILFRSQGGSDEESNLITLCHTCHKDLHSGKINPKLSGKVKGNLKYATQMNSIRKQLFKLYPDAVETFGYVTKANRLLLGIDKEHYYDACTIATQGNIFTVKSNLYKKKCISDGDFQKTKGIRSEQPIITDKICGFRKFDKVRYFGNKYFIKGRMSTGYAVLMDIDGNKVDFSAMPKGYKTPKLSNCKRIMARSTEMIQTLVI

SEQ ID NO: 22206 - protein, 230 aa, unidentified
  VARIANT 199..201: note = X can be any naturally occurring amino acid
VSKNYSDLHLSVQFGSIVQELVRFDLQQLKNPEFSGIEYQQVELPGYKVREYLLNKWERKCAYCGVENIALQVEHIYPRAKGGSNRIYHLCLACHSCNQKKGTKNIEQFLAEKPDIPKWNLAQAKRSVKDATAVNLTRWALFNRLKETGLPVVTGSGGLTKFNRTRLELPKSHWLDVACVGQVELLEVLTNKPLLIKAXXXQICRTDKFGFPSRYVPRNKSVKGFQTVIS

SEQ ID NO: 22207 - protein, 420 aa, Moorena sp.; identical to SEQ ID NO: 2632

SEQ ID NO: 22208 - protein, 435 aa, unidentified
VQKAFVVDRKGEPLMPCHPARARQLLREKRAVVHRRAPFTIRLKNREGGEVQPVRLKIDPGSRVTGMALVREDGNKAEVLHLAELHHRRGISKRMKQRRQYRRRRRSANLRYRPPRFLNRAASRRKGKLAPSLLSRVNHIESWVRRYRGMGPVAAISVELARFDMQKMENAEIKGVEYQQGTLHGYDVWEYLLEKWGRMCAYCGTENVPLEKEHIVPRSRRGSDRVSNLTVSCHECNQRKNNQTAKEFGHPEVEAQALQPLRDAAAVNSTRWATYRVLAATGLPVEVGTGSRTKYNRVRLALPKTHALDALCVGGSTPERVAGLEGTVVLVIGARGRGQYSRTSVDRYGFPRGYRTRKKLMYGFRTGDLVEAVVPRGKYAGRHAGVAVVRRSGYFDIKQNGTRVAQGISWRHFNALQRFDGYGYERGRAALEPHG

SEQ ID NO: 22209 - protein, 409 aa, unidentified
MIYVLNQEGQPLMPTKRHGKVRHLLEKGKAKVVKRTPFTIQLLYKGENYTQDITLGIDAGSKHIGVSASTDTEELYSSEVELRNDIVKLLSSRRALRSSRRNRKTRHRKARFDNRAKGKGWLAPSVRQKIDTHLKVVDDIHKILPITEIVVETAQFDIQKIKNPDISGTEYQEGEQLNSWNIREYVLFRDNHTCHHCKGKSKELVLNTHHIESRKTGGDAPNNLITLCKTCHDKFHKDEIELNIKRGQKFNHATFMGVMRWAFYNVLKEKYPNVKMTFGYITKNTRIENNLQKSHHIDALCIAGHPKAKQLDYYQVKKVRCHNRQIHKLTINKGGTRKNNQAPYIVKGFRLFDKVSYEGKECFIFGRRTTGYFDLRKLDGTTIHKSASYKKLKLIKPKGSYLIERKKVC

SEQ ID NO: 22210 - protein, 442 aa, unidentified
MKHENANRVFLLNKDGKPLMPCRPRKARLLLKSGKAFVVKKYPFTIQLKYGSYGYKQKVSLGVDTGQRHIGFAVVSQDKVLHQSEVELRQDVHTNLYTRKIYRRGRRTRKTRYRQARFLNRVHGKRDGLWLPPSVKSKVSHNIAWIKRYLAVLPNPDLHIEVGKFDMAKIVNPDISGKQYQEGSLKDWKNYEYYVLARDEYTCQLCYKHGEGVKLVVHHIVYRSQGGTDRVDNLITLCTNCHTTKNHQPGGKLYKWMKAKKKVTKQLKGATFMNILRKRIMTTFPEASFQYGSQTYVDRKNLLLPKGHFMDAIAISGIKPVGQIPETVTMISQFRKKKRSLHEATARKGRKQPNTSSKRNEKNTKYACGLWLNDYVRVIGNHVKGYVKGFKSNGYYVYLTDGLGNYVLNNGKNYINGQQCRLIMHNGNWQKAEQKLSLYEFK

SEQ ID NO: 22211 - protein, 470 aa, unidentified; identical to SEQ ID NO: 2825

SEQ ID NO: 22212 - protein, 279 aa, unidentified
VVIETAEFDLQLLKAIEEGKPVPQGEDYQQGEMYGHYNVRQYVLWRDGYTCQCCGAHATKKKEVRLHVHHLESRKVGGDAPDNQVTLCESCHEKLHKGLIAEKDFKKRKRKSTRDATFMGIMRKTLMQRLCSELPIPVVKTRGYITKATREKLLVLPKSHTNDALAIAQGKQGFNVGYLPGILQIDKIYTIRPVRHHNRQLHKATILKGGIRKSNQTKKYVFGYRLFDKVQFNGQDCFIWGRRTTGIFTIKTINGKMIKDGISFKKLKLVEKSTGYLIA

SEQ ID NO: 22213 - protein, 476 aa, unidentified
RARVFRQIPFTIQLTYENKPVLQPVTIAEDPGRSNIGMAVVSLSGELLSAAVVQTRNKEIVKLMEKRKQHRRASRNGERKARQRLAKKCHTMIKAGFLMRKLPMYGKDKRVQCNVIRNTEARFCNRKREDGWLTPSAEHLVRTHINLIHKMQKFLPITDVAIEINRFAFLSLEDPSISGVDFQNGPLKGYDDLNAAVEDLQDGHCLMCNSPIEHRHHIVPRSMQGSNTIGNIAGLCCKCHEKVHKDSAFEDSLKKKKAGLNKRYAAVSVLNQAIPFICKRLEQEFGKEHVHYCSGRDSSMVRRSLGYHKTKEEQLHEVDAWCIAVLSLQHVPEKAPEFDHVHEILQFRRQDRSRIKAQTSRAYYYKGKKIAKNRKKAEGQREDSLQEWRKRQVERYGEEQTRKMISQLKVKKSIRRYNRLDRLMPGAVFYYQGVRYVMRGQHSNRQYLQAVGMGSKDFPAKKCKIVVHNEGLVFVS

SEQ ID NO: 22214 - protein, 414 aa, unidentified; identical to SEQ ID NO: 2588

SEQ ID NO: 22215 - protein, 420 aa, unidentified
MQYVYVLSKHGEPMMPCSPGKARLLLKQQKAYVVRRTPFTIKLLYGSAGYKQPITLGVDAGSKHVGLSASTEKRELYREEFAPRNDVVELLSTRGQNRRSRRNRKTRYRAPRFDNRVHSKHKGWLAPSVEVKIQEHITIIKRICKILPISLVRVETAEFDTQRLKAMLAGKPLPVGTDYQLGEMYDEYNVRQYVLKRDHYTCQCCGTHNTAKKLVKLHVHHLESRKTGGNAPSNLITLCTTCHKNLHKGKVTLDGKERGKPLRDAAFMGIMRKTLMARLKKELPIPVQGTYGYITKMRREQNDIKKSHTNDARCISKHPLAEPCSVCYRTKAIRHHNRQTHKANFSKKGIRKRSQMPYLVEGYRLWDKVLYKEQECFVSGRRSSGSFTLKKLDGTSVSKGVTFKKLRLLEPATNYLIERM

SEQ ID NO: 22216 - protein, 512 aa, unidentified
MSTVYVLNKDGKPLMPTTRCGHVRRLLKEQKARAVASKPFTIQLLYETDDVVQPLYLGIDPGRTNIGVAVVKMDGTAVFTAHLETRNKEIPKLMKKRKDSRRARRTNGRRCRRQRRAKANGTISKKCVKHDTAQNGSVSKRAKEIGIIKRHLPGCEKDVLCIGIKNKEAKFSNRTRPEGWLTPTANQLLQTHINLVKKIRKFLPISDAVLEINKFAFMQLDNPNIQKWQYQQGPLYQKANLEEAVSEMQEHHCLFCKKPIAHYHHVVPQSENGSDTIGNIVGLCTKHHDLVHKDTAWQKKLAKKKTGLNKKYGALSVLNQIIPALTKELSSLFPKHFFATNGKSTYDYRSAHGVSKDHWLDAYCIACSVLPNDVCDSGINNRVPYELKQFRRHDRRALNNENMSRVYTLNDNVVATNRHKATKQTTDSLEEFRQNHPDDVCKLKVKEHHPTYRNMNRNYPGSVFLIGKQVHVMQGIAGSKDGEATTYKDTNANSIAAGKCKFVAKNSGILFV

SEQ ID NO: 22217 - protein, 430 aa, unidentified; identical to SEQ ID NO: 6024
  source 1..430: note = Spirochaetales bacterium UBA7869

SEQ ID NO: 22218 - protein, 407 aa, Methanohalophilus sp.; identical to SEQ ID NO: 19023

SEQ ID NO: 22219 - protein, 406 aa, unidentified; identical to SEQ ID NO: 2752

SEQ ID NO: 22220 - protein, 436 aa, Thermodesulfovibrio sp.; identical to SEQ ID NO: 22186

SEQ ID NO: 22221 - protein, 357 aa, unidentified
LKVFVLNMRGQPLMPCSPAKARHLLKAGKAVVKRRTSFTIQLRIATGETKQNVTLGVDAGAKHVGLSAATEKEEVFAPEVELRQDITGLLAARLSLRRERRQRKTRYRAPRFLNRVRSKHNGWLPPSVENRIQAHLSRIDAICGLLPVTKIVIETASFDIQKIKHPDVEGTDYQQGDQLGFWNVREYVLFRDGHVCQHCHGHAKDKILNVHHLESRQTGGDAPNNLITLCERCHKACHAGKIKLKVKRGQSFREEAFIGIMRWTLLDRVRKAHPGLPVENTYGYLTKNTRITLGLPKAHCVDAYCIAGNLKAVRRGVYLHQRQVRKHNRQIHKCTVLSKTLKDGTKIGYRKLNQTPH

SEQ ID NO: 22222 - protein, 424 aa, unidentified
MVVMNVVYVLSPDRVPLMPCSCAIARLLLKQGKAKVVRRTPFTIKMYTQPVDTHTQPLTLGIDTGSAVIGSAVSDECGNILYVSEGEVRNDIAQTMKNRATSRRNRRYRKTRYRPARWLNRRNSLKTGRFSPTMTSKTEAHLREIRFVQSLLPIQSIVLETGTFNPHALKHPAVLQNKWMYQKGINYGLANTKAYVLTRDGYVCQRCKGQSKDRRLEVHHIVFRSQQGSDEEANLLTLCKTCHEGLHAGTVTLKQKGKRKGNLLHATQMNSIRIQLLSRVEAIETWGFVTKEHRLLAGLPKEHIFDAAMIATRGNIPVFQTTEVLLKKCISDGDYQQTKGKHSQQRIPTGKIAGLRKFDKVRYLGVEYFIKGRMSTGYAILMDLSGNKLALKPTPKFDNMKRVSARSSWIINQKAMPSFSSSPT

SEQ ID NO: 22223 - protein, 458 aa, Acidithiobacillus sp.; identical to SEQ ID NO: 13713

SEQ ID NO: 22224 - protein, 471 aa, unidentified
MVITLDKRKKPLGFCTERRARKLLEKRRACVYRYYPFTIIIKDIDTRKMDKEDLPAYRMKIDPGSKATGVSIVREKDNTVMLFAQIEHRGQQIKKNMDTRRATRRNRRNRETRYRRCKYKDGGNFDSQRPEGWLPPSVKSIGDNIISWVKRFQKLINIQYVSFEAVRFDTQLMDNPNIQGEEYQQGTLLGYEIREYLLDKYGHTCQYCGGVSQDPILEWEHIQPKSKGGSDSVKNATLACHTCNQDKGNLTLSQWKEKEDAILSNKKASSKRKQLAKARLKGIAAVEYHKPQGIGMRYCAWVNSTRRYVEKHLYESFHSDNVECASGGRTKYNRTKLQLPKDHHYDALCVGQVPEEGYKDKTNGYVMHIKAIGRGSRFRGKINKCGIITTKLKKSPKKRFGFKNGDIVAADVPKGKYAGHHVGRVMTRARGSFDIRRTDGALVGVNYKYCRLLQHDSGYQYKYIKPIPLGN

SEQ ID NO: 22225 - protein, 473 aa, unidentified; identical to SEQ ID NO: 3562
  source 1..473: note = uncultured beta proteobacterium

SEQ ID NO: 22226 - protein, 411 aa, Desulfosporosinus sp.
MLTYVLNQNGKPLMPCKSSKARRLLKQSKAKVVKLEPFTLQLLHGSSGYKQEITLGVDAGSKMIGLSATTENNELYSADIQLRNDVVDLLSTRRQNRRTRRNRLRYRKPRFLNRVKSKNKGWLAPSIENKIQTHLTVVRNVYKVLPVSKVIVEVASFDIQKIKNPSISGTDYQQGEQIDFWNIREYVLFRDGHQCHGKKGCNNKILNVHHIESRKVGGDSPSNLITLCEECHNDYHKGKLELNINRGQKFKDATFMGIMRWSFYNRLKELYPIVSLTYGYITKNTRISNSLPKEHRIDALCISGNLMVKRLDYFYFSKKVRCHNRQIHKANILKGDVKKLNQAQFEVKGFRLFDKIQYQGKLYYIFGRRNSGFFDIRTLDGTKVNKGSISCRSFKLIERRKSLLTERRVAG

SEQ ID NO: 22227 - protein, 447 aa, unidentified; identical to SEQ ID NO: 8397

SEQ ID NO: 22228 - protein, 439 aa, unidentified
AEPAGIRKGDALKVFVLNMRGRPLMPCSPARARHLLKAGKAVVRRRTPFTIQLRIATGETKQSVTLGVDAGAKHVGLSAATEKEEVFASEVELRQDITGLLAARLSLRRDRRHRKTRYRAPRFLNRVRSKHKGWLAPSVENRIQAHMSRIDAVCRLLPVTRIVIETASFDVQKIRNLEVEGTGYQQGDQLGFWNVREYVLFRDGHVCQHCHGHAKDKILNVHHLESRQTGGDAPNNLITLCETCHKACHAGKIKLKVKRGQSFRAEAFMGIMRWTLLDRMRKAHSGLPVENTYGYLTKNTRITLGLPKTHCVDAYCIAGNLKAVRRGVCLHQRQVRKHNRQIHKCTVLSKTLKDGTKIGYRKLNQTPHLVKSFRLFDKVRCLGQTGFIFGRRSSGYFDVRRLDGVKISSCISYRKLTLLEKRSTCLTELRKEDGASSPV

SEQ ID NO: 22229 - protein, 536 aa, unidentified
VLRPRYQYPTRWYPSREQGSGNGCLSGEENTDLEQEVSGTLSKGDHSHPGEQDFCVPAITIQGGPAMSVFVVGLNGCRLMPTSERKARLLLKHGKASVYRKVPFTIKLNYKTGSTTQSGYLGIDTGSQHIGVSVVREDGTVLHKEEIGLRDSMSKRKLMQSRASSRRGRRHRKTRYRHPKWRPKAKRVYCKTPDRKGRHWKKRKITFASKRPKGWLPPSLQSKTDHHIRWIKKLQDLLPEGYRLSIELGRFDPARLKDPEIHGELYQKGPQYDYENVRAYVLDRDRYTCQVCGKKGGRLHVHHILYRSHGATDDPQYMATVCSDCHNTENHQQGGILYQWMQKQKKFTRGLRDATFMNILRKRLIEAFPGATFTYGNITKADRERLKLPKSHGNDATAIAIVKTGIMTVKDKEPVIYIQQVRRKKRSLHEETPRKGRKEPNRKASRYDKNTKAVTVTKRKNKKKISITGCLFDRVELNGKKGWISGFTDKSCYVKDENDQYIRTSPKYKQVSLSKLKILHHCGNWAIGARRSLGKG

SEQ ID NO: 22230 - protein, 470 aa, unidentified
MSVFVVGLNGCRLMPTSERKARLLLKHGKASVYRKVPFTIKLNYKTGSTTQSGYLGIDTGSQHIGVSVVREDGVVLHKEEIGLRDSMSKRKLMQSRASSRRGRRHRKTRYRHPKWRPKAKRVYCEIPDRNGRHWKKKEITFTSKRPKGWLPPSLQSKTDHHIRWIKKLQDLLPEGYRLSIELGRFDPARLKDPEIHGELYQKGPQYDYENVRAYVLNRDRYTCQVCGKKGGKLHVHHILYRSHGATDDPQYMATVCSDCHNTETHQQGGILYQWMQKQKKFTRGLRDATFMNILRKRLIEAFPGATFTYGNITKADRERLRLPKSHGNDATAIAIVKTGIMTVKDKEPVIYIQQVRRKKRSLHEETPRKGRKEPNRKASRYDKNTKAVTVTKRKDKKKISITGCLFDRVELNGKKGWISGFTDKSCYVKDENDQYIRTSPKYKQVSLSKLKILHHCGNWAIGARRSLGKG

SEQ ID NO: 22231 - protein, 555 aa, unidentified; identical to SEQ ID NO: 9226
  source 1..555: note = Lachnospiraceae bacterium UBA7276

SEQ ID NO: 22232 - protein, 430 aa, unidentified
LETRNEEIPKLMQGRKKARRARRTNGRRCRRQRRAKANGTISKKCVKQTTAQNGSASKRAKEIGVIKRHLPGCEKDVLCIGIKNKEAKFSNRTRPEGWLTPTANQLLKTHINLVKKIRKFLPISDVVLEINKFAFMRLDNPNIQKWQYQQGPLYQKASLEEAVSEMQEHHCLFCKKSIAHYHHVVPQSENGNNTIGNIVGLCTKHHDLVHKDTTWQKKLAKKKTGLNKKYGALSVLNQIIPALTKELSSLFPKHFFATNGKSTYDYRAAHSVSKDHWLDAYCIACSVLANDVCDSNINSRVPYELKQFRRHDRRALNNENMSRVYTLNGKVVATNRHKATKQTTDSLEEFRQNHSDDVCKLKVKEHHPTYRNMNRNYPGSVFLIGKQVHVMQGIAGSKNGEATTYKDTNANSIAAGKCKFVAKNSGILFV

SEQ ID NO: 22233 - protein, 431 aa, unidentified
MPNKVYVINKHGRPLMPCSPAKARHLLDEGKAKIKKRTPFTIQLVYGSSGYTQEVILGVDAGSKTIGVSASTKKEELFAANVIPRNDVVDLLSTRRESRRARRNRKTRYRKPRFDNRVRSKHKGWLAPSVEVKIQEHITSIKRACRILPVSKVVVETAEFDLQLLKAIADGKPVPQGEDYQKGEMYGHYNVRQYVLWRDDYTCQCCGAHATKKKEVRLHVHHLESRKVGGDAPDNQVTLCESCHEKLHKGLITAKDFKKRKRRSTRDATFMGIMRKTLMQMLCSELPIPVVKTRGYITKATREKLLVLPKSHTNDALAIAQGKQGFNVGYLPGIVQINKIYTICPVRHHNRQLHKATILKGGIRKSNQAEKYVFGYRLFDKVQFNGQDCFIWGRRTTGIFTIKTINGKMIKDGISFKKLKPVEKSTSYLIA

SEQ ID NO: 22234 - protein, 420 aa, unidentified; identical to SEQ ID NO: 20119

SEQ ID NO: 22235 - protein, 419 aa, unidentified; identical to SEQ ID NO: 7217

SEQ ID NO: 22236 - protein, 431 aa, unidentified
MSYVFVIDQEKRPLDPVHPGRARKLLSSGKAAVYRRFPFVLILKHPVSEAHPQPLRLKIDPGSKTTGLAVLNDTSGQVLWAAELVHRGEEVHQALQKRAGVRRGRRSRHTRYRAARFSNRRRKRGWLAPSLCSRMQNVQTWTRRLMRWCPLGAISYEAVRFDTQAIQNPEIKGVAYQHGTLAGLEVKEYLLLKWRHKCVYCQKGDIPLEVEHIVPKRRGGSDRITNLTLACEACNQQKGSQTAQAFGFPHLQAQALQPLKDAAAVNSTRWALYERLKATGLPIEVSTGGQTKWNRKQRGIPKCHWLDAVCVGPSTPERVQWQHVIPLLITARGRQCRQLCNVDGWGFPRSRPKGPSKVFGFQTGDMVQAVVTRGKRMGTYVGRVAIKTDGYFKITGTHGIVEGIHARYCSPLHRVDGYEYQKGSAALPPQM

SEQ ID NO: 22237 - protein, 507 aa, unidentified
MSEYIYVLGMDRNPQMPTKRKRHVEKLLQTGRARIFRQVPFTIQLTYENEPVLQPVTIAEDPGRSNIGMAVVSLSGELLSAAVVQTRNKEIAKLMEKRKQHRRASRNGERKARQRLAKKCHTMFKAGFLMRKLPMYGKDKRVKCHVIRNTEARFCNRKRKDGWLTPSAEHLVRTHINLVHKMQKFLPITDVAVEINRFAFLSLEDPSVSGVDFQNGPLKGYDNLNAAVEDLQDGHCLMCKDPIEHRHHIVPRSIQGSNTIENIAGLCCKCHEKVHKNAAFEKRLKKKKAGLDKQYAAVSVLNQAIPFICKRLEQEFGKEHVHYCSGRETAMVRRSFGYHKTKEEPLHEVDAWCISVLSLQQVPEKAPEFDHVHKIMQFRRQDRSRIKAQTSRTYYYEGKKVAKNRKKAEGQKEDSLQEWRECQITLYGEEQARKMTSQLKVRKSIRRYNRLDRLMPGAVFYYKGTRYVMRGQHGNGRYLQAVGMGNKDFPVKDCKIVIQNEGLVFLS

SEQ ID NO: 22238 - protein, 414 aa, unidentified; identical to SEQ ID NO: 11971

SEQ ID NO: 22239 - protein, 544 aa, unidentified
MKQKKQKVMVYILNKKGKPLMPTTRCGHVRKLLNSKKAVVVNSNPFTIRLKYDTPNGVQDVFAGIDSGRENIGSGASNEDGDCLYLGELKTSNKSIKLKMTERAGFRKERRRHDRQNKQRKARKDHTEIQNGNADICRTTISCKSVQISYPAAEKSVTHKIIRGKEGKFANRHRDEGWITPSARQLVQMHMNDLKSMCKILPISHVTLERVAFDFQKLENENIKVWEYGKGKLYGYDSPEEYIHDVQDGKCLVCGKPHIDYLHHIIPRSKGGSDKVSNIAGLCYDCHYGPMGVHNCQNTQDRLPELKSEANKQYKVSLLNSVMPVLIEEMDKFCKANSIMFSICEGHDTAKVRDMYDLQKDHCIDGFAISLVDRNVKSVDVMPDRIYQKQRYKKKSKNIIQKRNCREYYDDKKLVAVNRHKGTDQKADSLEEYMNTYAETHTTDECKKHFDSLVVKPARRTYTFHKEWRICPFHIGDKVRYEKKNKIKGNTKVDTFICEGIYFSKDENKAKVEHNKTKSKKMKFCRAIESGCIPYIDYIKLALI

SEQ ID NO: 22240 - protein, 424 aa, unidentified; identical to SEQ ID NO: 3434

SEQ ID NO: 22241 - protein, 451 aa, unidentified; identical to SEQ ID NO: 13438

SEQ ID NO: 22242 - protein, 512 aa, unidentified
MSTVYVLNKNGKPLMPTTRCGRVRHLLKEQKARVVTSNPFTIQLLYETDDVVQPLYLGIDPGRTNIGVAVVKTDGTAVFTAHLETRNKEIPKLMKKRKDFRRARRTNGRRCRRQRRAKANGTISKKCVKQTTAQNGSVSKYAKEIGVIKRHLPGCEKEVLCIAIKNKEAKFSNRTRPEGWLTPTANQLLQTHINLVKKIQKFLPISDVVLEVNKFAFMQLDNPNIQKWQYQQGPLYQKVSLEEAVSEMQEHHCLFCKKPIDHYHHAVPQHKNGSNTISNIVGLCTKHHDLVHKETAWQEKLAKKKTGLSKKYSALSVLNQIIPALTKELSSLFPKHFFATNGKSTYDYRAAHGVSKDHWLDAYCIACSVLQNDVCDSNINSHVPYELKQFRRHDRRALHKENMSRVYTLNGKKVATNRHKAVEQTTDSLEEFRQNHPDDVCKLKVKEHHPEYRNPKRNFPGCVFLVGKHTHVMQGTSGSHNGQADGYYDTNGNSYSSGKCKFVAKNEGIVFA

SEQ ID NO: 22243 - protein, 341 aa, unidentified
ARSAFRRRRRSQNFRCRSPRFLNRVKPKGWLPPSLRHRVETTLSFVRRMCRYLPVSGIATELVKFDSQKLQNPEVSGVKYQQGTLFEYEVREYLLEKFGRKCVYCGAEGVPLNIDHVVPRAKGGSNRVSNLVLACVSCNQKKGARSLEDFLKGKPEVLARVRRELKTPLRDAAAVNATRWVLFNELKATGLPVETGSGALTKLNRHAFGVEKEHWLDALCVGRLNGVVTRKGLNVLEIRCMGRGSRQRTRLTKYGFPRGYLMRQKCVHGFATGDMVEANVPKGKKAGLWRGRVAVRVSGSFNIQTPKGVIQGVGWKHCRLISHNDGYGYAWLGHAPHSSPA

SEQ ID NO: 22244 - protein, 427 aa, unidentified
LRVFVLNKRGKPLMPCSPAKARLLLKEKKAIVVRRTPFTIQLTIATGESKQPLSLGVDVGYKHVGLSASTEKAELYASEVELRKDITDLLSARRALRQSRRNRKTRYRAPRFDNRIRTKRKGWLAPSVENRINAHLSRIEAVLRLLPITKITVETASFDMQRLKNPDISGKEYQEGEQLGFWNVREYVLFRDGHVCRHCHGRSKDPVLNVHHLESRRTGSDSPDNLITLCVTCHKALHRGEITLKAKRGQSFRAQAFMGIMRREVLNRLKASYPELKVHETYGYLTKHARIANGIVKSHGADAFCIAGNLGAERLGEFFFQKQTRRNNRQIHKLSILKGGIRKRNQAPFEAKGFRLFDKVACQGEEGFIFGRRSSGSFDVRKLDGTRISAGINCKKLRLLEKRRTYLTEIRKEEALPPLPEGRGLRA

SEQ ID NO: 22245 - protein, 397 aa, unidentified
IVKRRTPFTIQLTIATGETKQPVSLGVDAGYKHVGLSASTEKAELYASEVELRQDITDLLSARRALRQSRRNRKTRYRAPRFDNRIRTKRKGWLAPSVENRINAHLSRIETVIRLLPVTKISVETTSFDMQLLKNSDIAGKEYQEGEQLGFWNVREYVLFRDGHVCQHCHGRSKDPVLNVHHLESRRTGSDSPDNLITLCETCHKALHRGEITLKAKRGQSFRAQAFMGIMRREVLNRLKASYPELKVHETYGYLTKHARIANGIVKSHGADAFCIAGNLGAERLGEFFFQKQTRRNNRQIHKLSILKGGIRKRNQAPFEAKGFRLFDKVACQGEEGFIFGRRSSGSFDVRKLDGTRISAGISCKKLRLLEKRRTYLTEIRKEETLPPLPEGRGLRA

SEQ ID NO: 22246 - protein, 421 aa, unidentified; identical to SEQ ID NO: 6517

SEQ ID NO: 22247 - protein, 304 aa, unidentified
LAGALCGGQDPGAYHQYQAGFELLPIGKVVVETAEFDLQLLKSIADGMPVPQGEDYQKGEMYGFYNVRQYVFFRDGYTCQCCGAHGKGIKFHTHHLESRKTGGNAPDDLVTVCDKCHKAFHAGLITDAKLKKRRRKSTRDAAFMGIMRKTLLQRLRAELPIPVVETRGYITKATRERLLKLPKSHTNDALAIAMGRHGFGIKEVTYMPQSDRIYQIKPVRHHNRQLHKAIPKKGGRRQRSQGPKYVQGFRRFDKVLYRGQECFIWGLRTRGYFQLKLLNGTKVHESAKASELILLEHRSGYLIA

SEQ ID NO: 22248 - protein, 425 aa, unidentified; identical to SEQ ID NO: 3655

SEQ ID NO: 22249 - protein, 461 aa, unidentified; identical to SEQ ID NO: 4910

SEQ ID NO: 22250 - protein, 431 aa, unidentified; identical to SEQ ID NO: 8350

SEQ ID NO: 22251 - protein, 442 aa, unidentified; identical to SEQ ID NO: 2834

SEQ ID NO: 22252 - protein, 427 aa, unidentified; identical to SEQ ID NO: 5062

SEQ ID NO: 22253 - protein, 451 aa, unidentified; identical to SEQ ID NO: 5203

SEQ ID NO: 22254 - protein, 325 aa, unidentified
LRVFVLNKRGKPLMPCSPAKARLLLKEKKAIVVRRTPFTIQLTIATGETKQPVGLGVDAGYKHVGLSASTEKAELYASEVELRQDITDLLSARRALRQSRRNRKTRYRAPRFDNRIRTKRKGWLAPSVENRINAHLSRIEAVLRLLPITKITVETASFDMQRLKNPDISGKEYQEGEQLGFWNVREYVLFRDGHVCRHCHGRSKDPVLNVHHLESRRTGSDSPDNLITLCETCHKALHRGEITLKAKRGQSFRAQAFMGIMRREVLNRLKASYPELKVHETYGYLTKHARIANGIVKSHGADAFCIAGNLGAERLGEFFFHKHTR

SEQ ID NO: 22255 - protein, 421 aa, unidentified
MKVFVKNMRGQALMPCSERKARILLKQKKAKIVGYKPFTIQLCYATGEAKQEVTIGIDEGAKHIGIAIVSQDKVLAKGEVELRQDVHSLLLTRAQYRRGRRFRKTRYRKARFLNRRKPKDWLPPSIRAKLDANFNWINKFCSLVPSPKLRIEVGKFDVAKMINPDIQGVDYQHGQTYGYYNVRYFVFARDEYTCQVCKKKNKVLHTHHIVYRSEGGTDRADNLITVCTDCHTSENHKPGGILYKWMKEHKKTKQYKEPPFMNVLRKRTFQQYPEAKITYGSETSSKRKKLNLEKTHYNDAIAITGIELIKENPKEYFLIKQFRKKKRSLHEAIPRKGRKSKNIESKRNNKNVKQLRGWFLNDEVICFDQRGWISGFAGTSSAYIININGEYIQIPNKSYKQVTLSSLKLISHNANWQYIAT

SEQ ID NO: 22256 - protein, 512 aa, unidentified
MSTVYVLNRDGKPLMPTTRCGHVRHLLKEQKARVVTSKPFTIQLLYETDDVVQPLYLGIDPGRTNIGVAVVKADSTAVFTAHLETRNEEIPKLMQGRKKARRTRRTNGRRCRRQRRAKANGTISKKCVKQTTAQNGSVSKRAKEIGVIKRHLPGCEKDVLCVGIKNKEAKFSNRTRQEGWLTPTANQLLQTHINLVKKIQKFLPISDVVLEVNKFAFMQLDNPNIQKWQYQQGPLYQKANLEEAVSEMQEHHCLFCKKPIAHYHHVVPQSENGSNTIGNIVGLCTKHHDLVHKDTEWQKKLAKKKTGLNKKYGALSVLNQIIPALTKELSSLFPKHFFATNGKSTYDYRAAHSVSKDHWLDAYCIACSVLANDVCDSNINSRVPYELKQFRRHDRRALNNENMSRVYTLNGKVVATNRHKATKQTTDSLEEFRQRQPNDVCKLKVKEHHPTYRNMNRNYPGSVFLIGKQVHVMQGIAGSKDGEATTYKDTNANSIAAGKCKFVAKNSGILFV

SEQ ID NO: 22257 - protein, 445 aa, Petrotoga sp.; identical to SEQ ID NO: 7625

SEQ ID NO: 22258 - protein, 419 aa, unidentified
LSKRMTKTLTKQTTQACVLDQQGKPLMPTTRLGKVYRLLKTQKAHIVSYELFTIQLDYEPDTHIIQPMTLGVDSGAIHSGYSVANEHREYYSAEVIARDDISKHLSDRRMYRQNRRSRKTRYRKPRFNNRKNKKKGWLPPSLEQKVTVQLNEIDHLHHYFPIQKIIVEVAEFDIQKIKNPDISGIEYQQGTLQGYNIRNYLLEKHGRKCFYCGKSVSKFEVEHMIPKTRGGSNRIDNLTLSCHDCNQKKDTLTAEEFIRQTLPAKKAAAKLKQLPNENRLFKYMTQMNATRWALYNAINEKYANVKMTYGYITKYNRIKAGLLKAHHIDAKCITGFSNVPSMDQIVVKIKMRRHNRQLHRATFSKGHVRKAACLPTVVFGFQLYDHVLFDNHHYYIKGRRSSGKFALVSIEGLKDTDRN

SEQ ID NO: 22259 - protein, 427 aa, unidentified; identical to SEQ ID NO: 4946

SEQ ID NO: 22260 - protein, 443 aa, unidentified
NIGEGSQPVERPRRQNLRVFVLNKRGKPLMPCSPAKARLLLKEKKAIVVRRTPFTIQLTIATGESKQPVSLGVDAGYKHVGLSASTEKAELYASEVELRKDITDLLSARRALRQSRRNRKTRYRAPRFDNRIRTKRKGWLAPSVENRINAHLSRIEAVLRLLPITKITVETASFDMQRLKNPDISGKEYQEGEQLGFWNVREYVLFRDGHVCRHCHGRSKDPVLNVHHLESRRTGSDSPDNLITLCETCHKALHRGEITLKAKRGQSFRAQAFMGNMRREVLNRLKASYPELKMHETYGYLTKHARIANGIVKSHGADAFCIAGNLGAERLGEFFFQKQTRRNNRQIHKLSILKGGIRKRNQAPFEAKGFRLFDKVACQGEEGFIFGRRSSGSFDVRKLDGTRISAGISCKKLRLLEKRRTYLTEIRKEEALPPLPEGRGLRA

SEQ ID NO: 22261 - protein, 442 aa, unidentified; identical to SEQ ID NO: 16204

SEQ ID NO: 22262 - protein, 465 aa, unidentified; identical to SEQ ID NO: 3856

SEQ ID NO: 22263 - protein, 427 aa, unidentified; identical to SEQ ID NO: 2980
  source 1..427: note = Cyanobacteria bacterium UBA11366

SEQ ID NO: 22264 - protein, 519 aa, Megasphaera sp.
  source 1..519: note = isolate UBA4233
MRQHHGIVTVAVVDKNGHPLMPTNSYRARHLKKSGRAVTYAHRPVYTIQMLDVEFDPEKNMVQEIEVTCDTGYEHIGVSVCSEKHEYLQREYDLLTDETEKHNDSRKYRRTRRNRKRHRAKMSRNRKGVIVKDGFAPSLRNKRDRHIDIITSLCFVMPITDVHVEMGEFDTQALKAIEEGKPLPQGTDYQQGEQYGYLTLRAAVFSRDNHTCQCCGRNAFSDKAMLHEHHIGFWKGDRTNRMANLLTVCEQCHTPKNHKPGGTLYGLEPKLKGLKGATFMTSVRWNMVNKLKEALPGISVHITYGAATKQSRQQLRLRKTHANDAYAMGNFHPKHRAHLEHFKKRRRNNRVLEKFYDAVYIDTRDGTEKMGSQLGCNRTKRNIPRNNPNNERKYRGEKKAKGHRSIRKQHYTLSPGDKVWCSTDKKMYIVNGMQNNGATVQLRTTKVVPLDKLQPMKKKGKTIPIAANQKLALISAKEKHTVLSVDEGTNTAVMRWFKGVNPSTLTRVSSYKTGWERIK

SEQ ID NO: 22265 - protein, 370 aa, unidentified
LSKVKTMRVFVFNMRGRPLMPCSQRKARLLLRENKAMIYKYHPFTIQLTYTTGETKQDCHIGIDTGSKYIGAAVRSEDKVFWKGEIELRQDIRSNLDTKRIYRRSRRNRKTRYRKPRFLNRKRRDEWLPPSLQSRINHTFHWIDTLSSLVPNPILHIEVGKFDVAKMINPEIHGVDYQHGQTYGFFDERYFVFARDNYTCQCCGKSKNKILNTHHIIYRSNGGTNRVDNLITVCTDCHTSQNHRKGGIFYQWQEQHKKVKQYKEPPFMNTLRKRIFVAYPDAEITYGSETTPKRKAMKLDKTHYNDAIVISGINEIKENPEEWLLIKQFRKKKRSLHEATARKGRKKPNRNQTRNSKNTPYYKGFYLNDK

SEQ ID NO: 22266 - protein, 413 aa, unidentified; identical to SEQ ID NO: 7541

SEQ ID NO: 22267 - protein, 460 aa, unidentified; identical to SEQ ID NO: 7594

SEQ ID NO: 22268 - protein, 427 aa, unidentified; identical to SEQ ID NO: 9882

SEQ ID NO: 22269 - protein, 536 aa, unidentified
VLRPRYQCPTRWYPSREQGSGNGCLSGEENTDLEQEVSGTLSKGDHSHPGEQDFCVPAITIQGGPAMSVFVVGLNGCRLMPTSERKARLLLKHGKASVYRKVPFTIKLNYKTGSTTQSGYLGIDTGSQHIGVSVVREDGAVLHKEEIGLRDSMSKRKLMQSRASSRRGRRHRKTRYRHPKWRPKAKRVYCEIPDRKRRHWKKKEITFTSKRPKGWLPPSLQSKTDHHIRWIKKLQDLLPEGYRLSIELGRFDPARLKDPEIHGELYQKGPQYDYENVRAYVLNRDRYTCQVCGKKGGKLHVHHILYRSYGATDDPQYMATVCSDCHNTENHHQGGILYQWMQKQKKFTRGLRDATFMNILRKRLIEAFPGATFTYGNITKADRERLRLPKSHGNDATAIAIVKTGIMTVKDKEPVIYIQQVRRKKRSLHEETPRKGRKEPNRKASRYDKNTKAVTVTKRKNKKKISITGCLFDRVELNGKKGWISGFTDKSCYVKDENDQYIRTSPKYKQVSLSKLKILHHCGNWAIGARRSLGKG

SEQ ID NO: 22270 - protein, 487 aa, unidentified; identical to SEQ ID NO: 5522

SEQ ID NO: 22271 - protein, 310 aa, Scytonema sp.; identical to SEQ ID NO: 18184

SEQ ID NO: 22272 - protein, 488 aa, unidentified
MIIALDKYKRPLGFLTERRCRILMERKRAVLYRVFPTVVILMDVDARTIPDLPSFRIKIDPGSKYTGIAIIRNDTDEFVYAMQIEHRGDAVRAALNKRKNARRNRRSRKLRRTRKQILPEAGYRRAKWGNRCLSEKDKRSYDSSREDGWLPPSIRSAADNVISWVRRLGRWINLTECSFEAVRFDTQLMEDPDIEGEEYQHGTLFGLEIKEYLMEKFGHTCQYCGGKSGDPVLEWEHMRPKSRGGSDRVKNALLSCSSCNKDKGNRTPEEWLEQIKARLPREKGKRKELDEERVKLIQKVIDGKPQGSALRYAAWVSSSRRYLEKALFGIFGDVECSSGGRTKYNRTELGYPKEHHYDALCVGTVPEKGYHDRTNGYYLYAKAAGRGTRLRGHLNKCGVIATKWTDRKKGFFGFQTGDIVVAEVPHKTPKPYKYEGRFVGRVMVRATGSFDIKTTDGKLVTVKEQYCRLLQANSGYHYTMKRAIPLGH

SEQ ID NO: 22273 - protein, 406 aa, unidentified; identical to SEQ ID NO: 2967

SEQ ID NO: 22274 - protein, 456 aa, unidentified; identical to SEQ ID NO: 3956

SEQ ID NO: 22275 - protein, 487 aa, unidentified
LLKEQKARVVQSNPFTIQLLYETNDVVQPLYLGIDPGRTNIGVAVVKADGTAVFAAHLETRNKKIPKLMQDRKKARRARRTNGRRCRRQRRAKANGTISKKCVKQDTAQSKNPSKRAKEIGVIKRHLPGCKKDVLCVGIKNKEAKYTNRARLEGWLTPTANQLLQTHINLVKKIQKFLPISDVVLEVNKFAFMRLDNPNIQKWQYQRGPLYQKGSLENAVSEMQEHHCLFCEKPIEHYHHVVPKSENGSNTIANIVGLCAEHHNLVHKDVAWQEKLVEEKTGLNKKYGALSVLNQIIPALTKELSFLFPKHSFMTNGKSTHDYRAAHGISKDHWLDAYCIACSVLPIDVCDSTINNCVPYELKQFRRHDRRALNNENMNRVYTLNDKVVATNRHKATEQEAASLEEFRKEHPNDVCKLKVKEHHPTYRNMNRNYPGSVFLVGKQIHVMQGIASSKDGKATKYNDTRATTIAAGKCKFVAKNSGILFV

SEQ ID NO: 22276 - protein, 430 aa, unidentified; identical to SEQ ID NO: 4817

SEQ ID NO: 22277 - protein, 411 aa, unidentified; identical to SEQ ID NO: 6901

SEQ ID NO: 22278 - protein, 442 aa, unidentified; identical to SEQ ID NO: 2834

SEQ ID NO: 22279 - protein, 400 aa, unidentified; identical to SEQ ID NO: 15552

SEQ ID NO: 22280 - protein, 419 aa, unidentified; identical to SEQ ID NO: 6954

SEQ ID NO: 22281 - protein, 436 aa, Leptolyngbya sp.; identical to SEQ ID NO: 22133

SEQ ID NO: 22282 - protein, 426 aa, unidentified; identical to SEQ ID NO: 3614

SEQ ID NO: 22283 - protein, 416 aa, unidentified; identical to SEQ ID NO: 4565

SEQ ID NO: 22284 - protein, 455 aa, unidentified
MVFVLDRHHKPLMPCHPARARRLLGKGRARIHKLYPFTIRLVDRELKDSTVQPVVLKLDPGSKETGMALVREDETKTHHALYFVNLKHRGSEIKQSLLQRSSFRRSRRSRNLHYRAPRFLNRTRPQGWLAPSLQHRVDTTLSWVERLRKLAPVATLEMELVKFDTQKMQNPEIDGVAYQQGKLAGFEVREYLLEKFGRKCIYCGAKGVPLNIDHIVPKSAGGSNRVSNLVLACVDCNQKKNNLPFEVFLKGDKAKINRIRSQLKTPLKDAASVNTTRWQLFEALKLTGLSLTTATGARTKYNRHQFGVPKEHWLDALCVGKVAAIRGWQTLDVLVVKCTGRGAYKRTRLTKDGFPRGYLTRTKRFFGFGTGDMVVATVFAGKKKGSYKGRVAVRKSGSFAIQTASRKVDGISYRYCRLLSRADGYGYSWHSSKSLINSTKETALLPRINTQVSAP

SEQ ID NO: 22285 - protein, 416 aa, unidentified; identical to SEQ ID NO: 10531

SEQ ID NO: 22286 - protein, 423 aa, unidentified; identical to SEQ ID NO: 4062

SEQ ID NO: 22287 - protein, 431 aa, unidentified; identical to SEQ ID NO: 4463

SEQ ID NO: 22288 - protein, 395 aa, Oscillochloris sp.
MVFVLATDRTPLDPTTFHRADHLLRCGRASVFRTYPFTIIVHDRTAVASVTHPHRLKLDPGSKTTGIAVVAEESGRVVWAGELTHRGQQIRDRLLTRRASRRSRRQRKTRYRQPRFLNRRRPEGWLAPSLQHRVETTLTWVNRLRRFVPITAISTELVRFDTQFMQDAEISGVAYQQGTLAGYEVREYLMEKWGRRCAYCGAKEIPLQIEHIVPRARGGSDQVSNLALACEPCNIRKGTQTAAEFGHLDIQAQARRPLKDAAAVNATRWVLYQRLTATGLLVEVGTGGRTKYNRTRLGLAKTHWHDAACVGASTPHGLEVRGVQPLLIRATGHGSRQACRMDKYGFPRTGPKGARVVKGFKTGDMVRAVVTTGTKVGVYVGRVAVRTTGSFNITT

SEQ ID NO: 22289 - protein, 438 aa, Clostridium sp.; identical to SEQ ID NO: 4933

SEQ ID NO: 22290 - protein, 431 aa, Escherichia sp.; identical to SEQ ID NO: 6926

SEQ ID NO: 22291 - protein, 451 aa, unidentified; identical to SEQ ID NO: 6577

SEQ ID NO: 22292 - protein, 490 aa, unidentified; identical to SEQ ID NO: 6170

SEQ ID NO: 22293 - protein, 549 aa, unidentified
LRSPLSLDDGQFTQYVYVVDKHGKALMPTTRYRHVRKLLKSGKAVAICNKLFTIRLKYESSTYTQDLWEGIDTGRQNIGDAVSNEKGENVYLADVRTNNKSIKSNMQDRAGFRRERRRHDRQSKQRKAKHDGTEIQNGDDDTVRTKHSCKSIKISYPTADEPVIHKVIRGKEGKFANRKRPEGWITPSARQVIQITMNEIRQTARILPVNHINLERVSFDFQKLENQDIRRWEYGKGALYGYKTYKDYIWDEQHGKCACCGKPITQYHHIIHRAEGGIDSVKNIIGLCNGCHNKIHASKDAEDKLKELKEGVRQRYYVGLLNSVIPALIEEVSAYCDEHGIEFTVTDGKTTAETREKYGLSKDHCTDAYAISLADRDVKSVSVSDRIYEKRRFKKKSGNIIAKRNQRVYKFDGKIIAYNRHKATNQKDDSFEEYMTKYAETHTDKECRQHVAQIEIIPAKRTYTYHKQGLVAPCHAGDIVRYEKHNKIKGNTKKDTFVATSVEMNGEGHIKYGDACGSRKIKFCRPIDSGCLQAVHNYQADEYLRKIAE

SEQ ID NO: 22294 - protein, 749 aa, unidentified
LKVFVLNMRGQPLMPCSPAKARHLLKAGKAVVKRRTPFTIQLRIATGETKQNVTLGVDAGAKHVGLSATTEKEEVFASEVELRQDITGLLAARLSLRRDRRHRKTRYRAPRFLNRVRSKHKGWLAPSVENRIQAHMSRIDAVCRLLPVTKIVIETASFDIQKIKDPSVEGTDYQQGDQLGFWNVREYVLFRDGHVCQHCHGRSKDKILNVHHLESRQTGGDAPNNLITLCETCHKAYHAGKIKLKVKRAHSFRAEAFMDIVRWTLLDRVRKAHPGLPVENTCGYLTKNTRITPGLPKAHCVDACCIAGNLKAVRRGVCLHQRQMRKHNRQIHKCTILLQTLEDGTKIGYRKLNQTPHMVKNFRLFDKVRCLGQTGFIFGRRSSGCFDVRRLDGVKLSSGISYRKLTLLEKRGTHLTELIKEDGASSSVRRQRFLRRVSMNKPCTYLLSALMASAVLAPVAALAVDKSELEVRMEAAQKVLADRSYYERWSPEAALKTVEDAKAANEAGSARQKEIDGALDVMKDWCHTRFLVNACIKDARDLHHEREKEIRSVRLKADEMIRLDRVEQRRARQESQKQNVKQPMKLGGSTESPESRSESRAEEVKTKQSRAEERRALEEANVRAYEEKQARAARKAEERHDPIRVKSRVKAPSSPIEGHLGRTAADVEAGRAEAAERMAQEDANIAAFNAKQAEAKKRLEEAEATAAERKASREARQANFNKTLEERRAAQKRYEESRENKDSGLKKYF

SEQ ID NO: 22295 - protein, 419 aa, unidentified
MVYVISQDGKPLMPCSDPIARLLLKQGKAKVKKREPFTIKLTYETTNYTQGLTLGVDTGSGTIGTAVSKDNGDIVYMSEVVVRNDITDKMTQRAKYRRNRRNRKTRYRKARWLNRASSIKKDRFSPTMQSKLHSHVREIEYIQSILPVTEMVFETGQFDMQLMKNPSLANPKVRPWGYQKGANYGFENTKAMVLNRDNYTCQCCKGKHKDSKLEVHHIVFRSQGGSDEESNLLTLCHTCHKDLHSGKINPKLSGKLKGNLKYATQMNSIRKQLFRFYPNAIETFGYVTKANRLHLGVDKEHYYDACTIATQGNAFNVKSNLYKKKCVSDGDFQKTKGIRSEQPIVTDKICGFRKFDKVRYFGNDYFIKGRMSTGYAIFMDIDGNKIDFSTMPRGYKTPKLSNCKRITARSTVMTQVKVV

SEQ ID NO: 22296 - protein, 465 aa, unidentified; identical to SEQ ID NO: 7667

SEQ ID NO: 22297 - protein, 512 aa, unidentified; identical to SEQ ID NO: 5549

SEQ ID NO: 22298 - protein, 497 aa, unidentified
LVGNVQAPWDVDPSPTLCGLCLKVLRGRNGDADKKPIPTLTKDENRPSGRTTGLRAEQAEPAGIRKGDTLKVFVLNMRGKPLMPCSPAKARHMLKAGKAFVVRRTPFTIKLTIATGETKQDVTLGVDAGARHVGISATTEKEEVFASEVALRQDITGLLADRLAFRRARRNRKTRYRAPRFNNRVRSKHKGWLAPSVENRIQAHMSRIDAVCRLLPVTKIVIETASFDIQKIRNPEVEGTGYQQGDQLGFWNVREYVLFRDGHICQHCRGRSKDPILNVHHLESRKTGGDAPNNLITLCETCHKAYHAGKIKLKVKRGQSFRAEAFMGIMRWTLLDRVRKAHPGLPVENTYGYLTKHTRITHGLPKTHCVDAYCIAGNLKAVRRGVYLHQRQMRKHNRQIHKFTVLSKRLEDGTKIGYRKLNQSPYLVHGFRLFDKVRCLGQIGFIFGRRSSGYFDVRRLDGVKLSSGISYRKLTLLEKRSTYLTELRKQDGASSPV

SEQ ID NO: 22299 - protein, 431 aa, unidentified; identical to SEQ ID NO: 15618

SEQ ID NO: 22300 - protein, 431 aa, unidentified
MQNKVYVINKHGRPLMPCSPAKSRHLLDDGKAKVKKRTPFTIQLIYGSSGYTEEVILGVDAGSKTIGLSASTKQEELFAANVTPRNDVVDLLSTRREFRRTRRSRKTRHRKARFNNRVHSKHKGWLAPSVDVKIQEHITCIKRVCNILPISKVVVETAEFDFQLLKAIDEGKPVPQGEDYQKGEMYGHYNVRQYVLWRDGYTCQCCGAHSTNRKDVRLHVHHLESRKTGGDAPSNQITICEDCHKKLHKGLIPDKNLKKRKRRSARDAAFMGIMRNTLVQRLHSELPIPVVETRGYITKATREKLLVLPKSHTNDALAIAQGKHGFNVDYFPNIVQVDKIYTICPVRHHNRQLHKATILKGGMRKANQAAKYVFGFRLYDKVRYNDIECFVWGRRNRGTFLLRNLDGEKVKDGASYRDLELLERSQGYLIA

SEQ ID NO: 22301 - protein, 417 aa, unidentified
MPCSPAKARLLLKEKKAIVKRRTPFTIQLTIATGEAKQPITLGVDSGYKHIGLSATTEKAELHASQVELRQDITDLLSARLALRRSRRSRKTRYRAPRFDNRVASKRKGWLAPSVENRITAHMSRVEAVMRVLPVTAITVETAAFDTQLLKNPDIAGEAYQQGEQLGFWNVREYVLFRDGHVCQHCRGKYKDPILNVHHIESRRTGGDAPNNLITLCETCHKAFHRGEIKLKVKRGKSFKAETFMGIMRWTLFERLKKAHPELSVRNTYGYLTKHKRISHGIAKSHCADAYCIADNLGAKRLEGFFFQKQTRKHNRQIHKLSILKGGLRKKNQAPYEVKGFRLFDKVICKGKEAFIFGRRTSGSFDVRRLDGTRISAGISYKKLRLLEPRTTYLTEFRKEAALPPLHKCRGFRAEFL

SEQ ID NO: 22302 - protein, 469 aa, unidentified; identical to SEQ ID NO: 4014

SEQ ID NO: 22303 - protein, 442 aa, unidentified
MSTTVFVLDKKHRPLMPCRPARARRLLRAGRARVVKRFPFVIRLVDRTVEQSEVQPVLIKLDPGSRETGAAVVRDDGKKRHHALAFFVIKHRGGAIRDALKARSAFRRRRRSQNLRCRSPRFLNRVKPKGWLPPSLRHRVETTLSFVRRMCRYLPVSGIATELVKFDSQKLQNPEVSGVKYQQGTLFEYEVREYLLEKFGRKCVYCGAEGVPLNIDHVVPRAKGGSNRVSNLVLACVSCNQKKGARSLEDFLKGKPEVLARVRRELKTPLRDAAAVNATRWVLFNELKATGLPVETGSGALTKFNRHAFGVEKEHWLDALCVGRLNGAVTRKGLNVLEIRCMGRGSRQRTRLTKYGFPRGYLMRQKCVHGFATGDMVEANVPKGKKAGLWRGRVAVRVSGSFNIQTPKGVIQGVGWKHCRLISHNDGYGYAWLGHAPHSSPA

SEQ ID NO: 22304 - protein, 431 aa, unidentified; identical to SEQ ID NO: 5274

SEQ ID NO: 22305 - protein, 424 aa, Enterococcus sp.; identical to SEQ ID NO: 8879

SEQ ID NO: 22306 - protein, 418 aa, Anoxybacillus sp.; identical to SEQ ID NO: 7935

SEQ ID NO: 22307 - protein, 438 aa, unidentified
MDTGYIHVGTSVKSEKHEYLAEQIDTLTDEKARHDACRMYRRQRRSRKRYRHPRFNNRKRNDRWIAPSLEHKKSIHIQAILRICKVMPVTDITLEMGNFDTQVLKAREEGKPLPHGADYQHGERYGIATLREAVFTRDDYKCQCCGMTIKDGAILHVHHIKYRSQGGTNRMSNLITVCDKCHTPANHKQGGKLYNWKPKIASFKGATYMTTIRWKLYNEVKALFPDIDIHITYGAETKERRRALDIDKSHVNDAFVMGQFHPKHRSKPICYKKKRRNNRCLEKFYDAKYIDSRDGKKRSGQELFNGRISRNHKKDSENLHQYRLQKVTPGRRAIRRQHYPIQPHDIIVYNGNKIEVSGCQHKVQESFFPKLKSQYRYQKLNYLNTLAVIPNQCLINRKGGSRRNVKPRIPPPPDCETRNIVSTSDGVPCAKKDGFRAI

SEQ ID NO: 22308 - protein, 419 aa, Moorena sp.
MQNYVFIIDTKKRPLNPISPKKARRLLKKGKAAVFRMYPFTIILKTAIDDPTISPCQIKIDPGSKVTGFALVQNGQVIWAMELQHRGGLIKKKLESRRAVRSGRRNRHTRYRKPRFLNRRRPQGWLPPSLEHRILTTQTWVKRLIKFCPVNEIWVERVKFDTQKMQNPEISGVEYQQGELAGYEVREYLLEKWERECTYCGKQNVPLQIEHIHPKSKGGSDCVRNLCLACEKCNQRKGNKPIEDFLKNKPSLLQKIKTKAKQPLKDAAAVNATRTKLVKMLQSVRPVVTGTGAQTKYNRMKLRLPKQHWIDAACVGDIETLTLITSQPLLVTCFGQGGRQKAALNKYGYPIRHNPLKPIKGWVTGDIAKHQKLGIGKVTPRSKGSFGFTSLGMKGYKSCKPQDISAIHRKDGYTYGFCQ

SEQ ID NO: 22309 - protein, 442 aa, unidentified; identical to SEQ ID NO: 2834

SEQ ID NO: 22310 - protein, 438 aa, unidentified
MPSSEYRARKLLKSGKAVKYSYHPFTIQLTKRKTGYAQPIELCMDTGYIHIGISVKSEKHEYLAEQIDTLTDEKTKHGACRMYRTLRRGRKRYRQPRFNNRKRDKDWIAPSLEHKKDIHVQAISRINKVMPLTDITMEMGNFDTQVLKAKEEGKPLPQGADYQHGERYGIATLREAVFSRDGYKCQCCGRTISDGAILHVHHIKYRSQGGTNSMTNLATVCDKCHTPKNHKPGGKLYNWKPKLPDFKGATFMTTIRWQLYNEVKSLFPDINVHITYGAATKEQRRELNIDKSHVNDAFAMGKFHPKHRTNAALYKKKRRNNRCLEKFYDAKYIDSRDGSKRTGQELFNGRINRNHKKDSENLHRYRLQKITAGKRTVRKRHYNIQPHDIVMYENRKRETSGCQSNGTRVILLSDKKSVAVKKVKIYKYAGGYFKSAFN

SEQ ID NO: 22311 - protein, 378 aa, Moorena sp.; identical to SEQ ID NO: 12580

SEQ ID NO: 22312 - protein, 423 aa, unidentified; identical to SEQ ID NO: 3951

SEQ ID NO: 22313 - protein, 430 aa, unidentified; identical to SEQ ID NO: 21800

SEQ ID NO: 22314 - protein, 460 aa, unidentified
MWTNRPQGLAYNILRKEAASVVYVLNKDGKPLMPTNRCGHVRKLLKSGKAIVVKRKPFTIKLTYDTPDCVQPISLGVDTGYTHVGVSAVTDTQEVYAAQVELLTGQKKRLDDRRKYRRTRRNRLRHRPPRFNNRRRNPGWLPPSLQHKVDSHIRIVEGIKAILPITEVHFEIGNFDTHKMKKPSIRPWQYTEGEMKGFDSVKEYVKNRDNYTCQLCGKQHKDGKGLVVHHFLYWKGRRSNNPNEMVILCDTCNSVANHEKSGPLWGWEPKQLRQLQQATFMNALAVRLMTVYPDADFLYGELTGERREEYNIPKSHTNDAFIIAGGKSQLRFDFPFNVEQRRRNNRSLEKFYDAKYIDSRDGSKQSGKALSSIRVKRKMPPKDSGFRQFRQSKVSKGKRYIRKKRHFYQPGDLVITPLGKAIVKGTICSGNSIQFYNFSRTFAPSKVEPIKFGKGFCFQT

SEQ ID NO: 22315 - protein, 414 aa, unidentified
MVYVINKQGQALMPTERFGKVRRLLKNSLAHVVCRIPFTIQLDYDTTDYTQPVSLGIDAGSKHIGISATTSEKELYAADVELRNDIVDKLSTRRELRRTRRSRLRYRKARFNNRVSSKRKGWLAPSVENKIQTHLTVVEKIHKFLPITNIVVETASFDIQKINNPSISGSEYQQGEQLDFFNVREYVLFRDNHTCQHCKGKSKDKVLNVHHIESRKTGGDSPNNLITLCETCHKAYHRGDFELNVKRGKSFRDAAFMGIMRWSFYDRLKNIYPNVSMTFGYITKNTRITNNLPKEHYVDARCISGNPTAKPLGYYFYQKKVRCQNRQIHKANFLKGGRKKLNQAPFLVKGFRLFDLVEYQKELYYIFGRRSNGSFDIRKLDGTKVNKGSINCKYLRLINKRKSILTEKRMQVNL

SEQ ID NO: 22316 - protein, 553 aa, unidentified; identical to SEQ ID NO: 14287

SEQ ID NO: 22317 - protein, 413 aa, unidentified
MPCSPAKARLLLKEKKAIVKRRTPFTIQLTIATGETKQPVGLGVDAGYKHVGLSASTDKAELYASQVELRQDITDLLSARRALRRARRNRKTRYRAPRFDNRIRTKRKGWLAPSVENRINAHLSRIEAVLRLLPVTKITVETASFDMLLKNPDIAGKEYQEGEQLGFWNVREYVLFRDGHVCQHCYGRSKDPVLNAHHLESRRTGGDSPGNLITLCETCHKALHRGEITLKAKRGQSFRAQAFMGIMRREVLNRLKASHSELEVNNTYGYRTKHARIVNGIDKSHCADAFCIAGNLGAERLCEFFFQKQTRRNNRQIHKLSILKGGIRKRNQAPFEAKGFRLFDKVACKGEESFIFGRRSSGYFDVRKLDGTRISAGISYKKLRLLEKRRTYLTEIRKEEALPPLPEGRGLRA

SEQ ID NO: 22318 - protein, 408 aa, unidentified; identical to SEQ ID NO: 21203

SEQ ID NO: 22319 - protein, 427 aa, unidentified; identical to SEQ ID NO: 5062

SEQ ID NO: 22320 - protein, 518 aa, unidentified; identical to SEQ ID NO: 7410

SEQ ID NO: 22321 - protein, 353 aa, Arthrospira sp.; identical to SEQ ID NO: 3451

SEQ ID NO: 22322 - protein, 415 aa, unidentified
MENKIEYCFVIDKNNKPLTPTKVNKGWYLIRKGRAKLKSKYPMVIQLEKEVKSDEYDESHMVCGIDDGSTHVGLAIVQKCLTKNKVVFKGTIEQRQDVKRLMDVRRGYRRYHRYHKRYRQARFNNRSSSKRTCRLAPSIKQKKDSILRVLYQLNKWVNIQEYYLEDVCIDIRAMTDDYKPYRWQYQKSNRLDENLRKATILRDGCRCQECGKSNCILEVHHIRARRYGGANTIGNLITLCKKCHDKTESREKDFEERYFNMIKSKPKRFDYAMHVMQGKTYLREKISELGILHLTNGGETANKRIEWDIVKSHSNDAICIADGIPDTCDIKEWIIKPMRRKSKAKTDNVLGIKHRDLVSYTYKSGETHTGYVTALYPEQLALNFQSKTKHCKKVNARKCRLLWKFNKIYWLEQCV

SEQ ID NO: 22323 - protein, 417 aa, unidentified
MPCSPAKARLLLKEKKAIVKRRTPFTIQLTIATGEAKQPVTLGVDSGYKHIGLSATTEKVELYASEVELRQDITDLLSARLALRRSRRSRKTRYRVPRFDNRVASKRKGWLAPSVENRITAHMSRVEAVMRVLPVTAITVETAAFDTQLLKNPDITGAAYQQGEQLRFWNVREYVLFRDGHVCQHCRGKSKDPILNVHHIESRRTGGDAPNNLITLCETCHKAFHRGKIKLKVRRGKSFKAETFMGIMRRTLFERLKKAHPELNVHNTYGYLTKHKRISHGIAKSHCADAYCIADNLGAKRLKGFFFQKQTRKHNRQIHKLSILKGGLRKKNQAPYEVKGFRLFDKVICKGEEAFIFGRRTSGSFDVRRLDGTRISAGISYKKLRRLEPRTTYLTEFRKEAALPPLHECRGFRAEFL

SEQ ID NO: 22324 - protein, 447 aa, unidentified; identical to SEQ ID NO: 4640

SEQ ID NO: 22325 - protein, 470 aa, unidentified; identical to SEQ ID NO: 2825

SEQ ID NO: 22326 - protein, 408 aa, unidentified; identical to SEQ ID NO: 17908

SEQ ID NO: 22327 - protein, 323 aa, unidentified
TRYRAPRFDNRIRTKRKGWLAPSVENRINAHLSRIETVIRLLPVTKITVETTSFDMQLLKNSDIAGKKYQEGEQLGFWNVREYVLFRDGHVCQHCHARSKDSVLNVHHLESRRTGGDSPGNLITLCETCHKALHRGEITLKAKRGQSFRAETFMGIMRWEVLDRLKASHSKLEVQNTYGYRTKHARISNGIAKSHCADAFCIAGNLGAERLGEFFFQKQTRRNNRQIHKLSILKHGLRKRNQVPFEVKGFRLFDKVACKGEEGFIFGRRSSGYFDVRKLNGTHISAGISCKKLRLLEKRQTYLTEIRKEKALPPLPEGRGLRA

SEQ ID NO: 22328 - protein, 427 aa, Mastigocoleus sp.; identical to SEQ ID NO: 18901

SEQ ID NO: 22329 - protein, 489 aa, unidentified
LVWNVQAPWDVYPSPTLCGLCLKVLRGRNGDADKKPIPTLTKDENRPSGRTTGLRAEQAEPAGIRKGDTLKVFVLNMRSKPLMPCSPAKARHMLKAGKAVVERRTPFTIKLTIATGETKQDVTLGVDAGAKHVGLSATTEKEEVFASEVELRQDITGLLADRLAFRRARRNRKTRYRAPRFNNRVRSKNKGWLAPSVENRIQAHISRIEAVCRVLPITKIVIETASFDIQKIKNSEVEGSGYQQGDQLGFWNVREYVLFRDGHVCQHCRGRSKDPILNVHHLESRKTGGDTPNNLITLCETCHKAYHAGKIKLKARRGTSFRAEAFMGIMRWTLLDRVRRAHPELPVENTYGYLTKHNRIALALPKTHCADAFCIAGNLNALRRGDFLFQRQTRTHNRQIHKCSILKGGVRKLNQAPFLVKGFRLFDKVKCKGGIGFVYGRRSSGFFDVRTLDGVRLSAGISYKKLMLVEKRTTFLTQLKKEHGASSPS

SEQ ID NO: 22330 - protein, 412 aa, unidentified; identical to SEQ ID NO: 14665

SEQ ID NO: 22331 - protein, 393 aa, unidentified; identical to SEQ ID NO: 6115

SEQ ID NO: 22332 - protein, 417 aa, unidentified
MPCSPAKARLLLKEKKAIVKRRTPFTIQFTIATGEARQPVTLGVDSGYKHIGLSATTEKDELYASEVELRQDITDLLSARLALRRSRRSRKTRYRAPRFDNRVASKREGWLAPSVENRIAAHMSRVEAVMRVLPVTAITVETAAFDTQLLKNPDIAGEAYQQGEQLGFWNVREYVLFRDGHVCQHCRRKSKDPILNVHHIESRRTGGDAPNNLITLCETCHKAFHRGEIKLKVKRGKSFKAETFMGIMRWTLFERLKKAHPELRVRNTYGYLTKHKRISHGIAKSHCADAYCIADNLGAKRLEGFFFQKQTRKHNRQIHKLSILKGGLRKKNQAPYEVKGFRLFDKVICKGEEAFIFGRRTSGSFDVRRLDGTRISAGINYKKLRLLEPRTTYLTEFRMEAALPPLHECRGFRAEFL

SEQ ID NO: 22333 - protein, 420 aa, unidentified; identical to SEQ ID NO: 2812

SEQ ID NO: 22334 - protein, 420 aa, unidentified; identical to SEQ ID NO: 3685

SEQ ID NO: 22335 - protein, 465 aa, unidentified; identical to SEQ ID NO: 12082

SEQ ID NO: 22336 - protein, 414 aa, unidentified
MPCSPAKARLLLKEKKAIVVRRTPFTIQLTIATGETKQPVSLGVDAGYKHVGLSASTEKAELYASEVELRQDITDLLSARRALRQSRRNRKTRYRAPRFDNRIRTKRKGWLAPSVENRINAHLSRIETVIRLLPVTKITVETASFDTQLLKNSDIAGKEYQKGEQLGFWNVREYVLFRDGHVCQHCHGRSKDPVLNVHHLESRRTGGNSPGNLITLCETCHKALHRGEIKLKAKRGQSFRAEAFMGIMRWEVLNRLKASHPELEAQNTYGYRTKHARIANGIAKSHCADAFCIAGNLGAERLGEFLFQKQTRRNNRQIHKLSIFKGGIRKRNQAPFEVKGFRLFDKVACKGEEGFIFGRRSSGFFDVRKLDGTHVSAGISYKKLRLLEKRQTYLTEIRKEEALPPLREGRGLRA

SEQ ID NO: 22337 - protein, 349 aa, unidentified
MPRNDVVENLSTRREFRRARRNRTTRYRKPRFNNRVHSKNNGWLAPSVEVKIQEHITSIKRVCAILPISKIVVETAEFDLQLLKAVQDGKPVPEGEDYQKGEMYGSYDVRQYVLWRDNYTCTCCGVKGTDKKPVKLHVHHFESRKHGGNAPDNYGTLCEDCHKKLHLGIITDISLKTRKRPSTRDAAFMGIMRKTLMQRLITGLSIPVAETKGYITKAAREEILKLPKTHTNDALAIAQGRHGFGIREQAYVKPTNRIYTVRPVRHHNRQLHKATMLKGGIRKLNQASKYIFGFRLYDKVLYQGGECFVWGRRRSGSFLLRTIDGTKVKDGVGYRNLTLLERSTNYLIA

SEQ ID NO: 22338 - protein, 417 aa, unidentified
MPCSPAKARLLLKEKKAIVKRRTPFTIQLTIATGEAKQPVALGVDSGYKHIGLSATTEKAELYASEVELRQDITDLLSARLALRRSRRSRKTRYRAPRFDNRVASKRKGWLAPSVENRIAAHMSRVEAVMRVLPVTAITVETAAFDTQLLKNPDIAGEAYQQGEQLGFWNVREYVLFRDGHVCQHCRGKYKDPILNVHHIESRRTGGDAPNNLITLCETCHKAFHRGEIKLKVKRGKSFKAETFMGIMHWTLFERLKKAHPELRVRNTYGYLTKHKRISHGIAKSHCADAYCIADNLGAKRLEGFFFQKQTRKHNRQIHKLSILKGGLRKKNQAPYEVKGFRLFDKVICKGEEAFIFGRRTSGSFDVRRLDGTRISAGISCRKLRLLEPRTTYLTEFRKEAALPPLHECRGFRAEFL

SEQ ID NO: 22339 - protein, 277 aa, unidentified; identical to SEQ ID NO: 16282

SEQ ID NO: 22340 - protein, 477 aa, Blautia sp.; identical to SEQ ID NO: 2707

SEQ ID NO: 22341 - protein, 480 aa, unidentified
LYTKPLDNIGEGSLPPSGEINLKGMTFMVYVKSIDGKALMPTSNAKARKLLKQKKAKVVSLRPFVVKLTYKTKTEYTQKLNLGVDSGYSNIGFSVIDAKQEYIAGEVKLLEGMKKRLLEKASYRRIRRSRLRYRKARWNNRVKSKKKGWLAPSLKHKLDTHIKFIYYLKNILPIGKITIEVANFDIQKMKYDLISGVDYQNGDMFGFWNVREFVLHRDGHKCQNPNCKHKDKKEQILKVHHIRYRSEGGSDRPENLITLCSKCHTPANHKKGKFLYDWCVNGKKVRGFKDATFMSMIRWYLVNDLKSKHNNVSITYGYITKNHRIQNGIEKSHLNDAFAIAKGTNQARTKDRFLVIQDRLKNRSLEKFYDSKIIDIRTEKKVSGGDLNCGRSTKNKNLNTENLRKYRGAKISKGQRRIRKQKYFYQPNDLVKYDGKVYTVKGTQNEGKYIALKEIKKVPKVELLIPYVFKKGLNWSYGLC

SEQ ID NO: 22342 - protein, 456 aa, unidentified; identical to SEQ ID NO: 6026

SEQ ID NO: 22343 - protein, 418 aa, Anoxybacillus sp.; identical to SEQ ID NO: 10474

SEQ ID NO: 22344 - protein, 355 aa, unidentified
AELYASEVELRQDVSDLLSARRALRQSRRNRKTRYRAPRFNNRLRTKCKGWLAPSVENRINAHLSRIEAVLRLMPVTKITVETASFDMQLLKNPDIAGKEYQEGEQLGFWNVREYVLFRDRHVCQHCYGRSKDPVLNVHHLKSRRTGGDSPDNLITLCETCHKALHRGDITLKAKRGKSFRAEAFMGIMRWEVHNRLRALHPGIEVSNTYGYRTKHARIANGIAKSHCADAFCIAGNLGAERLCEFFFQKQTRRNNRQIHKLSILKGGIRKRNQAPFEVKGFRLFDKVACQREESFIFGRRSSGVFDVRKLDGTRISAGISCKKLHLLEKRRTYLTEIRKEEALPPLPEDRGLRA

SEQ ID NO: 22345 - protein, 425 aa, Nodularia sp.; identical to SEQ ID NO: 3165

SEQ ID NO: 22346 - protein, 475 aa, Ferroplasma sp.; identical to SEQ ID NO: 12108

SEQ ID NO: 22347 - protein, 456 aa, Halomonas sp.; identical to SEQ ID NO: 8448

SEQ ID NO: 22348 - protein, 472 aa, Lactobacillus sp.
MGNNANPNWVSWFGRVAGITVSYITEKEKNMKHENANRVFLLNRDGKPLMPCRPRKARLLLKSGKAFVVKKYPFTIQLKYGSYGYKQKVSLGVDTGQRHIGFAIVSQNKVLYQSEVELRQDVHKNLYTRKIYRRSKRNRKTRYRQARFLNRVHGKRDGLWLPPSVKGKVNHNIAWIKRYLAVLPNPDLHVEVGKFDMAKMLNPQISGKQYQEGSLKDWKNYEYYVLARDEYTCQLCHKHGEGVKLVVHHIVYRSQGGTNRVDNLITLCTDCHTTKNHQPGGKLYKWMKVKKKVTKQLKGATFMNILRKRIMTAFPEASFQYGSQTYVDRKNLLLPKGHFMDAIAISGIKSVGQMPDTVTLISQFRKKKRSLHEATARKGRKQPNTSSKRNEKNTNHARGLWLNDYVRVIGNHAKGYVKGFKSNGYYVYLTNGLGNYVLNNGKNYINGQQCRLIMHNGNWQKAEQKLSLNEFK

SEQ ID NO: 22349 - protein, 450 aa, Clostridium sp.; identical to SEQ ID NO: 10471

SEQ ID NO: 22350 - protein, 494 aa, unidentified
MDMVYVLNKDGKPLMATTRGGRVRYLLKEKKARVVSSTPFTIQLNYDTPDATQDLILGIDPGRTNIGVAVVKEDGQCVFSAHLETRNKDVPLLMKKRAAFRRNHRTLDRRRKRQRRAKAAGTTIADGSAERLLPGYEKPIVCHYIRNKKARFNNRKCPQGWLTPTANHLLQTHINLIAKVAKFLPITKVVVELNRFAFMAMDNPNIRRWEYQQGSLYGLGSVEDAVYAQQDGHCLFCKKPIDHYHHVVPRRKNGSETLANRCGLCAKHHALVHTDKAWAGKLVTQKEGMNKKYHALSVLNQIIPSLMEYLGDEMLYDVYATDGRSTKGFRIAKNLPKEHYTDAYCIACSILDTNIKVSAPVEPFELKQFRRHDRQACHQQRVDRKYYLDGKQVATNRHKAIEQKSNSLEEFRETYGDAAVSQLTVKPHPPQYKDMTRIMPGAVMNFCGAVGILLGSDGFHNGKPDYYKSTKEEKVRMRRCALLAQNAGMVFIPA

SEQ ID NO: 22351 - protein, 341 aa, unidentified
LLSTRRESRRARRNRKTRYRKSRFNNRVRSKHKGWLAPSVEVKIQEHITSIKMVCRILPVSKVVVETAEFDLQLLKAIEEGKPVPQGEDYQQGEMYGHYNVRQYVLWRDNYTCQCCGAHLTKKKEVRLHVHHLESRKVGGNAPGNLVTLCDSCHEKLHKGLITEKDLKKRKHRSTRDATFMGIMRKTLMQRLCSELPIPVAETRGYITKATREKLLVLPKSHTNDALAIAQGKHGFNVGYLPGIEQIDKIYTIRPVRHHNRQLHKAAILKGGIRKSNQAGKYVFGYRLFDKVQFNGQDCFIWGRRTSGYFVVKTIDGKVIHNSASFKKLRLVERASNYLIA

SEQ ID NO: 22352 - protein, 390 aa, unidentified
VVRRTPFTIQLTIATGESKQSVSLGVDAGYKHVGLSASTEKAELYASEVELRKDITDLLSARRALRQSRRNRKTRYRAPRFDNRIRTKRKGWLAPSVENRINAHLSRIETILRLLPVTKITVETASFDMQLLKNPDISGKEYQEGDQLGFWNVREYVLFRDGHVCQHCHGRSEDPVLNVHHLESRRTGGDSPSNLITLCETCHKALHRGEITLKAKRGQSFRAEAFMGIMRREVLNRLKASHPELEVHNTYGYRTKHARIANGIDKSHCTDAFCIAGNLGAKRLGEFLFQKQTRRNNRQIHKLSILKGGLRKRNQAPFEIKGFRLFDKVACKGEESFIFGRRSSGYFDVRKLDGTRISAGISYKKLRLLEKRRTYLTEIRKEEAIPNSPA

SEQ ID NO: 22353 - protein, 447 aa, unidentified
MVFVLDKHKKPLMPCTPKRARLLLSQKRAVVHRLSPFTIRLKDREVASCTLQPVVLKVDPGSQATGMALTRVETTSEGEVHHALHLAELAHRGHEVVGLLHKRATRRRRRRQANLRYRPARFANRRRPKGWLPPSLRSRIGNVLTWARRYQRSVPVRRMDIERVKFDTQLLQNPEIDSVEYQRGELAGWEVRSYLLEKFGRQCVYCGRKDTAFELDHLHPKSRGGSKCVSNLVLSCHECNVAKGDQTASEFGHPEVQAQAKRPLRDAAAVNATRYALCDALSALEMPITTWSGGRTRWNRARFGITKAHCLDALCVGSLVGVEKGRHRTLQITAKGRGQYRRTNVDEAGFPVGYLMRQKQVMGFKTGDRVVAVVPEGFAAHGTHVGRIVVRAKKHFRMGKVQSIPARFCRKLQLADGYDYAVVETTLHLRAILPLASRKERLLPPYV

SEQ ID NO: 22354 - protein, 415 aa, unidentified
MVYVLDKNGQPLMPTDRHRKVRLMLQSGQAKVIKRCPFTIQLNYDSGHQTQEISLGIDAGSKHIGVSTTTKIKVLYEVDVELRNDIVDLLSSRRELRRGRRNRKTRYRQAKFNNRRLGNGWLPPSIRQKIGTHLTVVENICKMLPISRIMVETASFDIQKIKNPDIQGAEYQQGDQLEFWNVREYVLFRDGHTCQCCKGKSKDKILNVHHIESRKTGGNAPNNLITLCETCHTGYHKGTVQLPKAIKRGMRFKDAAFMGIMRWAFYEALKQQYEPVALVHNTYGYITKHTRIEHNLPKEHYVDARCISGNPEASSNGEYYYQKKVRCHNRQIHKLTVLKGGIRKQNQATYLVKGYRLFDKVSYQGKGYFVFGRRQSGFFDIRTLSGEKVNKGSLSCKKLKFIATRTYYLTERRAV

SEQ ID NO: 22355 - protein, 442 aa, Sutterella sp.
MSTSVFVLDKKHRPLMPCRPARARRLLRAGRARVVKRFPFVIRLVDRTVEQSEVQPVLIKLDPGSRETGAAVVRDDEKKRHHALAFFVIKHRGGAIRDALKAQSAFRRRRRSQNFRCRSPRFLNRVKPKGWLPPSLRHRVETTLSFVRRMCRYLPVSGIATELVKFDSQKLQNPEVSEVKYQQGTLFEYEVREYLLEKFGRKCVYCGAEGVPLNIDHVVPRAKGGSNRVSNLVLACVSCNQKKGARSLEDFLKGKPEVLARVRRELKTPLRDAAAVNATRWVLFNELKATGLPVETGSGALTKLNRHAFGVEKEHWLDALCVGRLNGVVTRKGLNVLEIRCMGRGSRQRTRLTKYGFPRGYLMRQKCVHGFATGDMVEANVPKGKKAGLWRGRVAVRVSGSFNIQTPKGVIQGVGWKHCRLISHNDGYGYAWLGHAPHSSPA

SEQ ID NO: 22356 - protein, 427 aa, Cylindrospermum sp.
MCKVLLIDTNKKPLDPIHSAQARQLLRNQKASIFRRFPFTLILKESHPDSVVSVLRLKIDPGAATTGIALVNDATGEVVFAAELKHRGFAIRDSLTSRRQLRRSRRARITRYRQPRFLNRTRTLGWLAPSLQSRVDNIKTWVEKLRFFAPIGAITQELVRFDMQLMRNPDIQGKEYQQGTLAGFETREYLLEKWNRECAYCGVKNVPLQIEHIQPKAKGGSNSITNLSLSCEKCNIKKGTKDIKDFLKKEPTRLQKILSQARKPASDAAAVNTTRFALLEVLTTTGLPVETGSGGLTKFNRSQQNIPKSHWADAAAVGKSTPLLNIKGVKPLLVKANGHGSRQSCRTDKYGFPCRYVPRFKFVNGFQTGDIVKAVVPKGKKIGKYIGRIAVRTSGSFNISTASGLAQGISHKNCKHIHKKDGYEYGK

SEQ ID NO: 22357 - protein, 451 aa, Anoxybacillus sp.
LHITSIYNMVEENMTCFMQRKGENPMVFVLDTNKRPLAPCHEAVARKLLKQGKAAIYGRFPFTIILKKSVDESEIKATYRLKIDYGSRHTGLAILRGQEVVWLGQLDHRTDIKERIDKRRAFRRARRNRKTRYRKPRFLNRKRKEGWLPSSLESRVQNIQTWVNRLKKLCPIGYISYENAKFDTQLMRNPEINGVEYQQGTLQGYEVREYLLEKFGRKCCYCGKENVPLEVEHIIPKSRGGTDRVDNLCLACHDCNQRKGSKTAEEFGYPHIQKQVKESLKDASAINSTRWKAYEVLKQTGLDVECGTGARTKMNRIRLDLPKTHYFDACCVGESTTNHLYFKTKEVLFIKAKGRGSRSRTNLDRYGFPRGYLARQKFFFGFQTGDMVKAVVPRGKYQGVWFGEVACRKTGSFDIKGKDGKRIAQGINYRYVQVIQRFDGYAYGKGVAELA

SEQ ID NO: 22358 - protein, 451 aa, unidentified
VTTILKTCFAAFNLAKVVVLMDAWDIIVVLNKRGKPLMPCSPAKARLLLKEKKAIVKRRTPFTIQLTIATGETKQPVSLGVDAGYKHVGLSASTEKAELYASEVELRQDITDLLSARRALRQSRRNRKTRYRAPRFDNRIRTKRKGWLAPSVENRINAHLSRIEAVLRLLPVTKITVETASFDMQLLKNPDIAGKEYQEGEQLGFWNVREYVLFRDGHVCQHCHGRSKDPVLNVHHLESRRTGGDSPGNLITLCETCHKALHRGDITLKAKRGKSFRAEAFMGIMRWEVHNRLRALHPGIEVSNTYGYRTKHARIANGIAKSHCADAFCIAGNLGAERLCEFFFQKQTRRNNRQIHKLSILKGGIRKRNQAPFEVKGFRLFDKVACQGEEGFIFGRRSSGYFDVRKLDGTRISAGISCKKLHLLEKRRTYLTEIRKEEALPPLPEGRGLRA

SEQ ID NO: 22359 - protein, 406 aa, unidentified; identical to SEQ ID NO: 6526

SEQ ID NO: 22360 - protein, 512 aa, unidentified
MSTVYVLNKDGKPLMPTTRGGHVRHLLKEQKARVVRTNPFTIQLLYETDNLVQPLYLGIDPGRTNIGVAVVKTDGTAVFTAHLETRNKEIPKLMQGRKKARRARRTNGRRCRRQRRAKANGTISKKCVKQTTAQNGSVSKRAKKIGVIKRHLPGCEKEVLCIGIKNKEAKFSNRARPEGWLTPTANQLLQTHINLVKKIQKFLPISDVVLEINKFAFMRLDNPNVQKWQYQQGPLYQKASLEEAVSEMQEHHCLFCKNTIDHYHHVVPQHKNGSNTIGNIVGLCAKHHDLVHKDTSWQEKLAKKKTGLNKRYGALSVLNQIIPALTKELSSLFPKHFFATNGKSTYDYRAAHGVSKDHWLDAYCIAGSVLPNDACDNNINSHVPYELKQFRRHDRRALHKENMSRVYTLNGKSVATNRHKAIKQTTDSLEEFRQRQPNDVCKLKVKEHHPEYRNPKRNFPGCVFLVGKHTHVMQGTSGSHNGKADGYYDTNGNSYSSGKCKFVAKNKGIVFA

SEQ ID NO: 22361 - protein, 671 aa, Clostridium sp.; identical to SEQ ID NO: 13815

SEQ ID NO: 22362 - protein, 427 aa, unidentified; identical to SEQ ID NO: 9614

SEQ ID NO: 22363 - protein, 455 aa, unidentified; identical to SEQ ID NO: 20167

SEQ ID NO: 22364 - protein, 421 aa, unidentified
MRGQPLMPCSPAKARHLLKAGKAVVKRRTPFTIQLRIATGETKQNVTLGVDAGAKHVGLSATTEKEEVFASEVELRQDITGLLAARLSLRRDRRHRKTRYRAPRFLNRVRSKHKGWLAPSVENRIQAHMSRIDAVCRLLPVTKIVIETASFDIQKIKDPSVEGTDYQQGDQLGFWNVREYVLFRDGHVCQHCHGRSKDKILNVHHLESRQTGGDAPNNLITLCETCHKAYHAGKIKLKVKRGQSFRAEAFMGIMRWTLLDRMRKAHSGLPVENTYGYLTKNTRITLGLPKTHCVDAYCIAGNLKAVRRGVCLHQRQVRKHNRQIHKCTVLSKTLKDGTKIGYRKLNQTPHLVKSFRLFDKVRCLGQTGFIFGRRSSGYFDVRRLDGVKFSSGISYRKLTLLEKRSTYLTELRKEDGASSPV

SEQ ID NO: 22365 - protein, 317 aa, unidentified
LSTRRELRRTRRNRLRYRKPRFDNRIKSKRPGWVAPSVKYKIDAHIRVIDNVCSILPISRIVIEVAQFDTQKIKNPNISGKEYQEGDQLGFWNVREYVLARDGHKCQYCKGKSKDAILNVHHIESRKTGGDSPSNLITLCETCHKEYHKGNIDLKIKRGSSLRDAAVMGIMKWKLYEELRSRYDRVFMTFGYITKHNRIKYGIEKSHTSDAFVISMNINAKRIERQYLKRLIRRHNRQMHKMKILKGGKKKNNQAPFEVFGFRLFDKVLYNNKIFFVYGRRKSGSFNIRDFNGENSKDVSRKKFKLIRGKRHPIILK

SEQ ID NO: 22366 - protein, 424 aa, unidentified
MRVFVFNMRGRPLMPCSQRKARLLLRENKAMIYKYHPFTIQLTYTTGETKQDCHIGIDTGSKYIGAAVRSEDKVFLKGEIELRQDIRSNLDTKRIYRRSRRNRKTRYRKPRFLNRKRRNEWLPPSLQSRINHTFHWIDTLSSLVPNPILHIEVGKFDVAKMINPEIHGVDYQHGQTYDFFDERYFVFARDNYTCQCCGKSKNKILNTHHIIYRSNGGTNRVDNLITVCTDCHTSQNHRKGGIFYQWQEQHKKVKQYKEPPFMNTLRKRIFVAYPDAEITYGSETTPKRKAMKLDKTHYNDAIVISGINEIKENPEEWLLIKQFRKKKRSLHEATARKGRKKPNRNQTRHSKNTPYYKGFYLNDKVSVFGKSGYITGFTSNAAYIKDENNDYITLPNKTYKQVSINKMKLECHNNNWQYIIKNAV

SEQ ID NO: 22367 - protein, 443 aa, unidentified
NIGEGSQPVERPRRQNLRVFVLNKRGKPLMPCSPAKARLLLKEKKAIVVRRTPFTIQLTIATGESKQPVSLGVDAGYKHVGLSASTEKAELYASEVELRKDITDLLSARRALRQSRRNRKTRYRAPRFDNRIRTKRKGWLAPSVENRINAHLSRIEAVLRLLPITKITVETASFDMQRLKNPDISGKEYQEGEQLGFWNVREYVLFRDGHVCRHCHGRSKDPVLNVHHLESRRPGSDSPDNLITLCVTCHKALHRGEITLKAKRGQSFRAQAFMGIMRREVLNRLKASYPELKVHETYGYLTKNARIANGIVKSHGADAFCIAGNLGAKRLGEFFFQKQTRRNNRQIHKLSILKGGIRKRNQAPFEAKGFRLFDKVACQGEEGFIFGRRSSGSFDVRKLDGTRISAGISCKKLRLLEKRRTYLTEIRKEEALPPLPEGRGLRA

SEQ ID NO: 22368 - protein, 420 aa, unidentified; identical to SEQ ID NO: 3089

SEQ ID NO: 22369 - protein, 451 aa, unidentified
MTTFVFVLDRKGRSLMPCHPARARKLLKKGRARVHKVFPFTIRLTDRELENSSVQPMLIKIDPGSKETGIALLREEKNKGHHALYFINLQHRGQQIRNALHKRRCLRRSRRSRNLRYRSPRFLNRRRAEGWLAPSLQHRADSILSWVSRLRKITPVERISQELVKFDTQLIQNSKIEGIEYQQGELAGYELREYLLEKFGRKCIYCGADNVPLNIDHVIPKSKGGSNRVSNLVLACVQCNQKKGSRSIEEFLKDKPEVLRQIKNQLKQPLKDAASVNATRWKLFNKLKSTGFPFEVGSGALTKFNRKKFGILKAHWLDALCVGNVPSVTNWRNLNVLNIKCCGRGAYQRTRTDKYGFPRGICMRQKKVYGFSTGDMVKAIIPKGKKKGVYVGKVAVRKTGSFNLQTSGQTIQGISYRYCRLITHSDGYSYSWKSCPIPPRLETRGILGEVR

SEQ ID NO: 22370 - protein, 430 aa, unidentified; identical to SEQ ID NO: 5683

SEQ ID NO: 22371 - protein, 282 aa, unidentified
TELVKFDSQKLQNPEVSGVKYQQGTLFEYEVREYLLEKFGRKCVYCGAEGVPLNIDHVVPRAKGGSNRVSNLVLACVSCNQKKGARSLEDFLKGKPEVLARVRRELKTPLRDAAAVNATRWVLFNELKATGLPVETGSGALTKLNRHAFGVEKEHWLDALCVGRLNGAVTRKGLNVLEIRCMGRGSRQRTRLTKYGFPRGYLMRQKCVHGFATGDMVEANVPKGKKAGLWRGRVAVRVSGSFNIQTPKGVIQGVGWKHCRLISHNDGYGYAWLGHAPHSSPA

SEQ ID NO: 22372 - protein, 420 aa, unidentified
MQYVYVLSKHGEPLMPCSPGKARLLLKEKKARVVRRTPFTIKLLYGSAGYKQPITLGVDAGSKHVGLSASTKKHELYREEFTPRNDVVKLLSKRKQYRRSRRNRKTRYRAPRFNNRVHSKHKGWLAPSVEVKIQEHITVIKRICRILPISLVRVETAEFDTQRLKAMLEGKSLPVGTDYQLGEMYDEYNVRQYVLKRDNYTCQCCGAHTTKKKTVKLHVHHLEGRQVGGNAPNNLITLCVDCHKALHAGKVKLDGKKRGKSFKDAAFMGIMRKTLMARLRDELPIPVQGTYGYITKMRREQNDIKKSHVNDARCISKHPLAEPCSVCYRTKAIRHHNRQTHKANFSKGGTRQRSQMPYVVEGYRLWDKVLYKGQECFVSGRRASGSFTLKKLDGTCISKGVTFKKLRLLEPATNYLIERM

SEQ ID NO: 22373 - protein, 386 aa, unidentified; identical to SEQ ID NO: 19656

SEQ ID NO: 22374 - protein, 535 aa, Streptomyces sp.; identical to SEQ ID NO: 19283

SEQ ID NO: 22375 - protein, 425 aa, Planktothrix sp.
MSNYVFVIDTNKQPQNPVHPAQARLLLNQGQAAVYRRYPFTIILKESKPESEIEQITLKIDPGSKTTGITLVQGNKVIWGAELTHRGQTIKMSLESRRLLRRSRRNRKTRYRQARFLNRTRQKGWLAPSLQHRVETTLTWVNKLIRLVPISSIVQELVRFDLQQLENPEISGIEYQQGELQGYEVRQYLLEKWSRKCAYCGVENVPLEVEHIHPKSQGGTDRISNLTMACHDCNQKKGNQDIQDFLSGKPDLLQRILKQAKQPLKDATVVNSTRWSLFNRLKETGKPVSTGSGGLTKFNRTRLNLPKTHWLDAACVGKITTLKVLTNKPLLIKATGHGSRQMCRTDKLGFPSRYVPRFKFVNGFQTGSIVKAIVTKGKKIGTYIGRIAVRSSGSFNISSKGVLIQGISYKYCTTIHKKDGYLYAT

SEQ ID NO: 22376 - protein, 427 aa, unidentified; identical to SEQ ID NO: 2980
  source 1..427: note = Cyanobacteria bacterium UBA11367

SEQ ID NO: 22377 - protein, 477 aa, unidentified; identical to SEQ ID NO: 12969

SEQ ID NO: 22378 - protein, 515 aa, unidentified; identical to SEQ ID NO: 21109

SEQ ID NO: 22379 - protein, 477 aa, unidentified
MIIALDKYKRPLGFLTERRCRILMERKRAVLYRVFPTVVILMDVDARTIPGLPSFRIKIDPGSKYTGIAIIRNDTDEFVYAMQIEHRGDAVRAALNKRKNARRNRRSRETGYRRAKWGNRCLSEKDKRSYDSSREDGWLPPSIRSAADNVISWVRRLGRWINLTECSFEAVRFDTQLMEDPDIEGEEYQHGTLFGLEIKEYLMEKFGHTCQYCGGKSGDPVLEWEHMRPKSRGGSDRVKNALLSCSSCNKDKGNRTPEEWLELIKARLPREKGKRKELDEERVELIQKVIDGKPQGGALRYAAWVSSSRRYLEKALFGIFGNVECSSGGRTKYNHTELGYPKEHHYDALCVGTVPEKGYHDRTNGYYLYAKAAGRGTRLRGHLNKCGMIVTKWTDRKNGFFGFQTGDIVVAEVPHKTPKPYKYEGRFVGRVMVRATGSFDIKTTDGKLVTVKEQYCRLLQANSGYQYTMKRAIPLGH

SEQ ID NO: 22380 - protein, 418 aa, Anoxybacillus sp.
KRPLAPCHEAVARKLLKQGKAAIYRRFPFTIILKKSVDESEIKATYRLKIDYGSRHTGLAILRGQEVVWLGQLDHRTDIKERIDKRRAFRRARRNRKTRYRKPRFLNRKRKEGWLPSSLESRVQNIQTWVNRLKKLCPIGYISYENAKFDTQLMRNPEINGVEYQQGTLQGYEVREYLLEKFGRKCCYCGKENVPLEVEHIIPKSRGGTDRVDNLCLACHDCNQRKGSKTAEEFGYPHIQKQVKETLKDTSAINSTRWKAYEVLKQTGLDVECGTGARTKMNRIRLDLPKTHYFDACCVGESTTNHLYFKTKEVLFIKAKGRGSRSRTNLDRYGFPRGYLARQKFFFGFQTGDMVKAVVPRGKYQGVWFGEVACRKTGSFDIKGKDGKRIAQGINYRYVQVIQRFDGYAYGKGVAELA

SEQ ID NO: 22381 - protein, 416 aa, unidentified; identical to SEQ ID NO: 21452

SEQ ID NO: 22382 - protein, 236 aa, unidentified; identical to SEQ ID NO: 5916

SEQ ID NO: 22383 - protein, 431 aa, unidentified
MPNKVYVINKHGRPLMPCSPAKARHLLDAGKAKVKKRTPFTIQLVYGSSGYTQEVILGVDAGSKTIGMSASTTKEELLSAEVKPRNDVVDLLSTRREFRRARRNRKTRYRKPRFDNRVRSKHKGWLAPSVEVKIQEHITAIRRVCGILPVSKVVVETAEFDLHLLKAIADGKPVPQGEDYQKGEMYGHYNVRQYVLWRDNYTCQCCGTHPSKKKEVRLHVHHLESRKVGGDAPDNQVTLCESCHKKLHKGLIEAKDFKKRKRRSTRDATFMGIMRKTLMQRLCSELPIPVVKTRGYITKATREKLLVLPKSHTNDALAIAQGKRGFNVGYLPEIAQIDKIYTIRPVRHHNRQLHKATILKGGIRKSNQTEKYVFGYRLFDKVQFNGQDCFIWGRRTTGIFTIKTINGKMIKDGISFKKLKLLEKSTSYLIA

SEQ ID NO: 22384 - protein, 451 aa, unidentified
VTTILKTCFAAFNLAKVVVLMDAWDIIVVLNKRGKPLMPCSPAKARHLLKEKKAAVVRRTPFTIQLTIATGESKQPVSLGVDAGYKHVGLSASTEKAELYASEVELRQDITDLLSARRALRQSRRNRKTRYRAPRFDNRIRTKRKGWLAPSVENRINAHLSRIETVIRLLPVTKISVETTSFDMQLLKNSDIAGKEYQEGEQLGFWNVREYVLFRDGHVCQHCHGRSKDPVLNVHHLESRRTGSDSPDNLITLCETCHKALHRGEITLKAKRGQSFRAQAFMGIMRREVLNRLKASYPELKVHETYGYLTKHARIANGIVKSHGADAFCIAGNLGAERLGEFFFQKQTRRNNRQIHKLSILKGGIRKRNQAPFEAKGFRLFDKVACQGEEGFIFGRRSSGSFDVRKLDGTRISAGISCKKLRLLERRRTYLTEIRKEEALPPLPEGRGLRA

SEQ ID NO: 22385 - protein, 512 aa, unidentified; identical to SEQ ID NO: 7153

SEQ ID NO: 22386 - protein, 512 aa, unidentified; identical to SEQ ID NO: 3493

SEQ ID NO: 22387 - protein, 420 aa, unidentified; identical to SEQ ID NO: 8221

SEQ ID NO: 22388 - protein, 427 aa, unidentified; identical to SEQ ID NO: 18169

SEQ ID NO: 22389 - protein, 451 aa, unidentified
MSVAVMSKTGMRLMPTSEYRARKLLKSKKATVYGHHPFTIQLTERKTGDVQPVELCMDTGYLHIGTSVKSEKHEYFGVQIDTLTDEKQKHDACRMYRRQRRSRKRYRQSRFNNRKRSDGWIAPSLEHKKDIHIQTISRICNAMPITNITLEMGNFDTQVLKALEENRPLPQGTDYQHGERYGIATLREAVFARDKYTCQCCRKTIADGAILHVHHIIYRSRGGTNRMSNLATVCDRCHTPANHKPGGRLYNWKPKIASFKGATFMTAVRWKMYNEVKSKFSDINIHITYGAETKEQRRAFDITKSHVNDALVMGQFHPKHRSRPVCYKKKRRNNRCLEKFYDAKYIDSRDGKKRSGQELFNGRINRNHKKDSENLHQYRQQKVSAGRRTIRKQHYSIQPHDIIVFNRQQFETSGCHCNGARAILLPQKKSVAIKKLSIHKYAGGYFKSDFT

SEQ ID NO: 22390 - protein, 373 aa, unidentified
LGVDAGYKHVGLSASTEKAELYASEVELRQDVSDLLSARRALRQSRRNRNTRYRAPRFDNRIRTKRKGWLAPTVENRINVHLSRIETVLRLLPVTKITVETASFDTQLLKNPDIAGKEYQEGEQLGFWNVREYVLFRDGHVCQHCHGRSKDPVLNVHHLESRRTGGDSPGNLITLCETCHKALHRGEIKLRAKRGQSFRAETFMGIMRWGVLNRLKASHPKLEVHNTYGYRTKHARIANGIAKSHCADAFCIAGNFGAKRLGEFFFQKQTRRNNRQIHKLSILKGGIRKRNQAPFEVKGFRLFDKVACQGEEGFIFGRRSTGYFDVRKLDGTCISAGISYKKLHLLEKRRTYLTEIRKEEALPPPPEGRGLRA

SEQ ID NO: 22391 - protein, 410 aa, unidentified
MFVDMVYVQDIDGKPMMPTTRHGKVRRLLKDKKAVVVNLCPFTIRLTYVTSDYKQEIVLGVDAGTKHVGLSATTKSKELYSSEVILRNDIVDLLSTRRELRRTRRNRLRYRKPRFDNRIKSKRPGWVAPSVKYKVDAHIRVIENICSILPISRIVIEVAQFDTQKINNPNISGKEYQEGNKLGFWNVREYVLARDGHKCQYCKGKSKSKILNVHHLESRKTGGDSPSNLITLCETCHKEYHKGNIDLKIKRGSSLRDAAVMGIMKWKLYEELRSRYDRVSMTFGYVTKYNRIKYGIEKSHTSDAFVISKNINAKRIGCQYLKRLIRRHNRQIHKMKILKGGKKKNNQAPFEVFGFRLFDKVLYNNKICFVYGRRKSGSFNIRDFNGENSKDVSRKKFKLIRGKRHPIILK

SEQ ID NO: 22392 - protein, 414 aa, unidentified; identical to SEQ ID NO: 4492

SEQ ID NO: 22393 - protein, 431 aa, unidentified; identical to SEQ ID NO: 4306

SEQ ID NO: 22394 - protein, 411 aa, unidentified; identical to SEQ ID NO: 3917

SEQ ID NO: 22395 - protein, 376 aa, unidentified; identical to SEQ ID NO: 14786

SEQ ID NO: 22396 - protein, 390 aa, unidentified
ISKKCVKQTTAQNGSVSKRAKDIGVIKRHLPGCEKEVLCIGIKNKEAKFSNRTRPEGWLTPTANQLLQTHINLVKKIQKFLPISDVVLEINKFAFMRLDNPNVQKWQYQQGPLYQKASLEEAVSEMQEHHCLFCKNTIDHYHHVVPQHKNGSNTIGNIVGLCAKHHDLVHKDSAWEKKLAKKSTGLYKKYGALGVLNQIIPTLTNELSSLFPKHSFVTNGKSTYDYRAAHGVSKDHWLDASCIACSVLPSNVCDSNINNHMPYVLKQFRRHDRRVLNNENMNRVYTLNNKAVAINRHKAKDQKTVSLEEFRKEHPDDVCKLKVKEHHPTYRNMNRNFPGSVFLVGKQIHVMQGIASSKDGKATKYNDTSATAIAAGKCKFVAKNTGILFV

SEQ ID NO: 22397 - protein, 420 aa, unidentified; identical to SEQ ID NO: 6017

SEQ ID NO: 22398 - protein, 416 aa, unidentified
MVYVLDKNGQPLMPTDRHRKVRLMLQSGQAKVIKRCPFTIQLTYNTGHQAQEISLGIDAGSKHIGVSATTKTRVLYEADVELRNDIVDLLSSRRELRRGRRNRKTRYRPARFDNRRREDGWLAPSIRQKIGTHLTVVENICKILPISRITVETASFDIQKIKNPDIQGAEYQQGDQLGFWNNREYVLFRDNHTCQCCKGKSKDKILNVHHIESRKTGGNAPNNLITLCEICHTGYHKGAIQLPKTVKRGMRFKDAAFMGIMRWAFYEALKQQYEPVGTPVHNTYGYITKHTRIAYNLPKEHYVDARCISGNPEASSNGEYYYQKKVRCHNRQIHKLTVLKGGIRKQNQATYLVKGYRLFDKVSYQGKGYFVFGRRQSGFFDIRTLSGEKVNKGSLSCKKLKFIATRTYYLTERRAV

SEQ ID NO: 22399 - protein, 460 aa, unidentified
MVAVVDLFGKPLMPTNEYRARKLLKQKKAKIFGYRPFTIQLTERKSTEIQPIELCMDTGYIHIGISAKSERHEYLGMQIDTLTDEKLKRDDKRQYRRQRRNRKRYRTPRFDNRRRKEGWIAPSLEHKKEIHIDAIQRICKVMPITDITLEMGNFDTHVLKAVEEGKPLPQGSDYQHGERYGIATLREAVFLRDGYKCQCCEKSVKDGAILHVHHIKYRSQGGTNRMSNLITVCDKCHTPKNHKPGGKLWNWKPKLAEFKGASYMTSIRWMLYNEVTALLPNSSVHITYGAKTKESRRKLDIKKSHVNDAYVMGLFCPKHRTKPVYFKKKRRNNRVLEKFYDAKYIDSRDGKKQSGQELFNGRISRNHRKDSENLHLYRKRKVTKGRRSIRSRHYPIQPHDILLYQKKKYETAGCHNNGSRAILLPEKKSVALKQLTMYQYAGGYYRVPYESNKKEERTGS

SEQ ID NO: 22400 - protein, 504 aa, unidentified; identical to SEQ ID NO: 3854

SEQ ID NO: 22401 - protein, 420 aa, unidentified
MFVYVLDKNGQPLMPTQRFGKVRRMLRDRKAKVVKRCPFTIRLLYEPKTKIVQDVVLGVDTGSKHVGVACVGNDKVLYQSQVELRDDIKRKMDSRRMYRRSRRNRKTRYRKARFLNRGNSIKKGRHCPTIVSKYYGHEREIEFCKKIIPVKDTVLETGKFDTQLMEKPWLQQYKWAYQRGVNYGYANAKEHALVRDKYTCQCCGKKNCRVEAHHIVFRSKNGSNDLENYITLCEDCHKAVHLGEIELKLNGKRKSDLRHATQMSIIRSMLLKKYQDAIETYGFVTKANRENLNIDKEHYLDACVIASGGLAFEPLDVLYRKRCVPTQNRCLSQGIRAEKKIPTGKVHGFKRYDKVKYLGVICFVSARRTRGDFVLMGIDNNTIDFRDIGGVQNPSYKFIKRLNARRSVLCMLQRIEKGGW

SEQ ID NO: 22402 - protein, 460 aa, unidentified; identical to SEQ ID NO: 20487

SEQ ID NO: 22403 - protein, 456 aa, unidentified; identical to SEQ ID NO: 4485

SEQ ID NO: 22404 - protein, 427 aa, Nostoc sp.; identical to SEQ ID NO: 2670

SEQ ID NO: 22405 - protein, 423 aa, Moorena sp.
MRVFVLNKNRQPLDPCKPARARIILSTGKAKVYRRYPFTIILTEEIEEPITHTHQLKIDPGAKTSGLAIVQNSRVVWGGELTHRGFQIRDALTSRRQLRRARRNRKTRYRKPRFLNRPWSEGWLAPSLMSRVYNILTWVKKLTRLCPITGFSQELVRFDTQKLQNPEISGFEYQQGTLYGYELREYLLEKWNRKCAYCGTTDTQLEIEHIKPLSKGGSDRVSNLAIACHSCNQAKSNQEVEHFLSGKPDVLKRVKAQAKRPLADAASVNATRWKLYHELKSIGLPVKVGSGGLTKFNRCRQNLPKTHWLDAANVGKIETLVIEVTHPLIITAKGHGTRQLCRTNKYGFPIRYCSRTKVHKGFQTGDIVRAVVTKGKKIGTYVGRVATRKSGSFNISTKSGLVQGISHKYCQFIHRKDGYAYTI

SEQ ID NO: 22406 - protein, 421 aa, unidentified; identical to SEQ ID NO: 11759

SEQ ID NO: 22407 - protein, 424 aa, unidentified; identical to SEQ ID NO: 8297

SEQ ID NO: 22408 - protein, 294 aa, Parasutterella sp.; identical to SEQ ID NO: 13141

SEQ ID NO: 22409 - protein, 480 aa, unidentified; identical to SEQ ID NO: 7001

SEQ ID NO: 22410 - protein, 414 aa, unidentified; identical to SEQ ID NO: 2588

SEQ ID NO: 22411 - protein, 411 aa, unidentified; identical to SEQ ID NO: 5658

SEQ ID NO: 22412 - protein, 420 aa, unidentified; identical to SEQ ID NO: 3546

SEQ ID NO: 22413 - protein, 456 aa, unidentified; identical to SEQ ID NO: 13627

SEQ ID NO: 22414 - protein, 412 aa, unidentified; identical to SEQ ID NO: 6276

SEQ ID NO: 22415 - protein, 408 aa, unidentified; identical to SEQ ID NO: 20775

SEQ ID NO: 22416 - protein, 515 aa, unidentified
MTALEERLSKTEYIYVLSFDGKPQMPTRRKRHVLKLLKTGRARIAEDIPFTIRLAYRNAPVLQPVTLAEDPGRTNIGAAVLSPLGDLLFAAVIETRNKEIKKLMADRKKSRQASRRGERKARQRLAKRYGSMLKSGMIMRKLPMYAADKFVTCKFIRNTQARFCNRKRCPDWITPTVQHLVQTHLNIIRKISRFLPVTDIAIEVNRFAFIHMENPEAVGVDFQNGPLKGYDDVKEAIRTQQHGKCLMCKKPIGHFHHIVPRSRGGSDTIQNLAGLCPECHTKVHTDTAFRKDFNRKKTGQLKKYGALSALNQAVPFICKKLLEEYGEEHVHFCRGLDTSLIRTALGFEKTKKNQMHEVDAYCIGLAALEVNEVETPAFDHTFQIRQFRRQDRSIIHHQTGRSYYQGKEKVAQNRKPGFEQKTTALSQWYEEQVRIHGEKEAEKLRSQLRVEKSCRHYNEMDRFLPGAVFLYEGKRYVLSGRITNGKYLRACGQGMKNFPAAECTFIRHNAGLVFI

SEQ ID NO: 22417 - protein, 462 aa, unidentified
MSVLVIGRNGRALMPTNPRKARLLLKKKTASVVCRHPFTIQLLYKTGCATQKGSIGIDTGSQHIGVGITCGDKVILKDEHALRSSMEKRSLLATRAVMRRGRRYRKVRYRKPKWRHHTKRMYFEKANRRGQHWRKVKTTTQSPRSKGWLPPSLQSKCDHHFRIIDRYLKYLPDPITRNLVIETGRFDMARMNDPTIHGEMYQRGPMYDAENLRAYIFARDNYQCACCKAKAGTTRKADGTTVKLVAHHILFRSRGATDNPKYIISVCDHCHTTKAHQPGGILYSWMENNKKVARGLRDATFMNILRKRLFARYPQAAFTYGNITAADRKKLRLPKSHANDAVAISLFGKEASTVKNICQTMHYKQIRKSKRSLHEAIPRKGRKNPNTKAVRNKKNTTQVNGFKLWDSVLANGKKLFICSFTGTSAYLIDKNGCYISQPGKTYKQWPLSKLKRLHPNGNWLMA

SEQ ID NO: 22418 - protein, 420 aa, unidentified; identical to SEQ ID NO: 3089

SEQ ID NO: 22419 - protein, 449 aa, unidentified
MSSVLTGNPRCRPVLSPLGDLLFAAVIETRNKEIKKLMADRQKSRQASRRGERKARQRLAKRYGSMVKSGMVMRKLPMYAADKFVICKFIRNTQARFCNRKRCPDWITPTVQHLVQTHLNIIRKISRYLPVTDIAFEVNRFAFMHMENPEAMGVDFQNGPLKGYGDVKEAIRTQQHGKCLMCKKPITHFHHIVPRSRGGSDTIQNLAGLCTECHTKVHTDTAFRKDFDEKKSGQLKKYGALSALNQAVPFICKKLLEEYGEEHVHFCRGLDTSLIRTAFGFEKTKKNQMHEVDAYCIGLAALEVNEVETPAFDHTFQIRQFRRQDRSIIHHQTGRSYYQGKEKVAQNRKPGFEQKTTALSQWYKEQIRIHGEKEAEKLRSQLRVEKSCRHYNDMDRFLPGAVFLYEGKRYVLSGRITNGKYLRACGQGMKNFPAAECTFIRHNAGLVFI

SEQ ID NO: 22420 - protein, 393 aa, unidentified; identical to SEQ ID NO: 5287

SEQ ID NO: 22421 - protein, 431 aa, unidentified
MPNKVYVINKHGRPLMPCSPAKARHLLDAGKAKVKKRTPFTIQLVYGSSGYTQEVILGVDAGSKTIGMSASTTKEELLSAEVKPRNDVVDLLSTRREFRRARRNRKTRYRKPRFDNRVRSRHKGWLAPSEEVKIQEHITAIKMVCRILPVSKVVVETAEFDLQLLKAIADGKPVPQGEDYQKGEMYGHYNVRQYVLWRDGYTCQCCGAHTTKKKEVRLHVHHLESRKTGGDAPGNLVTLCDSCHEKLHKGLITEDDFKKRKRRSTRDATFMGIMRKTLMQRLCSELPIPVIETRGYITKATREKLLVLPKSHTNDALAIAQGKHGFNVGYLPGIAQIDKIYTIRPVRHHNRQLHKATILKGGIRKSNQAEKYVFGYRLFDKVQFNGQDCFIWGRRTTGIFTIKTINGKMIKDGISFKKLKPVEKSTSYLIA

SEQ ID NO: 22422 - protein, 384 aa, unidentified
MSKRKLMQSRASSRRGRRHRKTRYRHPKWRPKAKRVYCEIPDRKGRHWKKKEITFASKRPKGWLPPSLQSKTDHHIRWIKKLQDLLPEGYRLSIELGRFDPARLKDPEIHGELYQKGPQYDYENVRAYVLDRDRYTCQVCGKKGGRLHVHHILYRSHGATDDPQYMATVCSDCHNTENHQQGGILYQWMQKQKKFTRGLRDATFMNILRKRLIEAFPGATFTYGNITKADRERLKLPKSHGNDATAIAIVKTGIMTVKDKEPVIYIQQVRRKKRSLHEETPRKGRKEPNRKASRYDKNTKAVTVTKRKNKKKISITGCLFDRVELNGKKGWISGFTDKSCYVKDENDQYIRTSPKYKQVSLSKLKILHHCGNWAIGARRSLGKG

SEQ ID NO: 22423 - protein, 279 aa, unidentified
VVVETAEFDLQLLKAIADGKPVPQGEDYQKGEMYGHYNVRQYVLWRDNYTCQCCGAHATKKKEVRLHVHHLESRKVGGDAPDNQVTLCESCHEKLHKGLIAEKDFKKRKRKSTRDATFMGIMRKTLMQRLCSELPIPVVKTRGYITKATREKLLVLPKSHTNDALAIAQGKRGFNVGYLPEIAQIDKIYTIRPVRHHNRQLHKATILKGGIRKSNQAGKYVFGYRLFDKVQFNGQDCFIWGRRTTGIFTIKTINGKMIKDGISFKKLKPVEKSTSYLIA

SEQ ID NO: 22424 - protein, 431 aa, unidentified; identical to SEQ ID NO: 4832

SEQ ID NO: 22425 - protein, 431 aa, unidentified
MDAWDIIVILNKRGKPLMPCSPAKARLLLKEKKAIVVRRTPFTIQLTIATGEAKQPVSLGVDAGYKHVGLSASTEKAELYASEVELRQDVSDLLSARRALRQSRRNRKTRYRAPRFDNRIRTKRKGWLAPSVENRINAHLSRIEAVLRLLPVTKITVETASFDMQLLKNPDISGKEYQEGEQLGFWNIREYVLCRDGHVCQHCYGRSKDPVLNVHHLESRRTGGDSPGNLITLCETCHKALHRGEITLKAKRGQSFRAEAFMGIMRWEVLNRLKASHPELEVNNTYGYRTKHARIANDIAKSHCADAFCIAGNLGAERLGEFFFQKQTRRNNRQIHKLSILKGGIRKRNQAPFEVNGFRLFDKVACKGEEGFIFGRRSSGYFDVRKLDGTRISAGISYKKLHLLEKRQTYLIEIRKEEAFPPLPEGRGLRA

SEQ ID NO: 22426 - protein, 400 aa, unidentified
KKAIVVRRTPFTIQLTIATGESKQPVSLGVDAGYKHVGLSASTEKAELYASEVELRQDITDLLSARRALRQSRRNRKTRYRAPRFDNRIRTKRKGWLAPSVENRINAHLSRIETVIRLLPVTKISVETTSFDMQLLKNSDIAGKEYQESEQLGFWNVREYVLFRDGHVCQHCHGRSKDPVLNVHHLESRRTGGDSPGNLITLCETCHKELHRGEITLKAKRGQSFRAETFMGIMRWEVLDRLKASHPKLEVQNTYGYRTKHARIVNGIAKSHCADAFCIAGNLGAERLGEFLFQKQTRRNNRQIHKLSILKGGIRKRNQVPFEVKGFRLFDKVACKGEEGFVFGRRSSGYFDVRKLDGTRISTGISYKKLRLLEKRQTYLTEIRKEEALPPLPEGRGLRA

SEQ ID NO: 22427 - protein, 493 aa, unidentified; identical to SEQ ID NO: 18934

SEQ ID NO: 22428 - protein, 430 aa, unidentified
MPKVYVLNRHGRPLMPCTPAKARHLLDAGKAKVRHRTPFTIQLLYGSTGYTQEVILGVDAGSKTIGLSAATETEELFSAEVKPRNDVVELMSARRQFRRARRNRTTRYRKPRFDNRVRSKHKGWLAPSVEVKIQEHMTAIRRACAILPVSKVVVETAEFDLQLLKAVAEGKPVPQGEDYQKGEMYGHYNVRQYVLWRDSYTCCICGVHGSVRKGVPLHVHHLESRRVGGDAPDNLVTLCTACHDKLHKGIIMAADIKKRKRRSTRDATFMGIMRMTLLRRLREQLPVPVVETRGYITKATRENLLVLPKSHTNDALAIAHGPQGFRAEYLPNIRQADRLYTIRPVRHHNRQLHKATILKGGVRKANQAEKYICGFRLYDKVLYNGIECFVWGRRTSGSFLLRQLNGEKVKDGVSYKHIKLLERSQSYLVA

SEQ ID NO: 22429 - protein, 430 aa, unidentified
MPKVYVLNRHGRPLMPCTPAKARHLLDAGKAKVRHRTPFTIQLLYGSTGYTQEVILGVDAGSKTIGLSAATETEELFSAEVKPRNDVVEMMSARRQFRRARRNRTTRYRKPRFDNRVRSKHKGWLAPSVEVKIQEHMTAIRRACAILPVSKVVVETAEFDLQLLKAVAEGKPVPQGEDYQKGEMYGHYNVRQYVLWRDSYTCRICGMHGSVRKGVPLHVHHLESRRVGGDAPDNLVTLCTACHDKLHKGIIMAADIKKRKRRSTRDATFMGIMRMTLLRRLREQLPVPVVETRGYITKATRENLLVLPKSHTNDALAIAHGPQGFRAEYLPNIRQADQLYTIRPVRHHNRQLHKATILKGGVRKANQAEKYICGFRLYDKVLYNGIECFVWGRRTSGSFLLRQLNGEKVKDGVSYKHLKLLERSQSYLVA

SEQ ID NO: 22430 - protein, 403 aa, unidentified
LARNLLNNGKAAVFKRYPFTIILKIEVTATQKSITLKIDPGSKTTGIALVQGENVIFGAELTHRGQTITASLESRRSLRRGRRNRHTRYRQARFFNRTRQKGWLAPSLQHRVETTLTWVNKFIRLAPIGSIVQELVRFDLQQLENPEISGVEYQQGELAGYEVREYLLNKWDRKCAYCGVENVPLQIEHIHPKAKGGSDRISNLCLACENCNTRKGTQGIEQFLSKKPEILKRILSQAHRPLKDATAVNSTRWALFNRLRMTGLPVSTGSGGLTKFNRTRLNLAKTHWLDAACVGNIGALEILTNKPLLIKATGHGTRQICRTDKFGFPSRYVPRFKFVKGFQTGDIVKAVVTSGKKIGTYIGRVAVRTTGSFNISTVGGLMQGINQKYCSLLHRKDGYSYAA

SEQ ID NO: 22431 - protein, 508 aa, unidentified
LTFVSIYVQRVYGRTRRFFQSAALHSGRQARGNIYPAGQTAGVLQKEVRTMAAVYVISASGKPLMPTTRCGHIRGLLNAGKARVVEREPFTIQLKYETPDVTQPLYLGIDPGRTNVGSAVVREDGECVFTAQLTTRNKDVPKLMKARKQFRMAHRRLKRRCKRQRRAKAAETLSQKGEFQRLLPGYEEPILCKGIRNKEARFNNRQRPAGWLTPTANHLLLTHLNMVKKLQKLLPITDVVLEVNRFAFMAMETPSIRRWQYQQGPLYGKGSVEDAVYAQQDGHCLFCGKPIAHYHHVVPQHKNGSETPENRVGLCNEHHDLVHKDRAWDAKMKETKAGLNKKYHALSVLNQIIPALTEQLTAMFPQHAFVTTGKDTADFREDYGIAKEHHLDAYCIACSVLAEPTKVAAPTGKPHRLMQFRRHDRQVCHKENIKRVYLSEGKAVATNRHKAIEQKDDSLEEFRKTHTQQEVSALTVKDHQPVYKDMRRFMPGGVFLFNGKVHTLHRSH

SEQ ID NO: 22432 - protein, 420 aa, unidentified; identical to SEQ ID NO: 6219

SEQ ID NO: 22433 - protein, 511 aa, Ruminococcus sp.; identical to SEQ ID NO: 10153

SEQ ID NO: 22434 - protein, 470 aa, unidentified; identical to SEQ ID NO: 2825

SEQ ID NO: 22435 - protein, 406 aa, unidentified; identical to SEQ ID NO: 18587

SEQ ID NO: 22436 - protein, 434 aa, Anoxybacillus sp.; identical to SEQ ID NO: 5674

SEQ ID NO: 22437 - protein, 417 aa, Petrotoga sp.; identical to SEQ ID NO: 14528

SEQ ID NO: 22438 - protein, 447 aa, unidentified; identical to SEQ ID NO: 5316

SEQ ID NO: 22439 - protein, 414 aa, unidentified
MPCSPAKARLLLKEKKAIVKRRTPFTIQLTIATGETKQPVSLGVDAGYKHVGLSASTEKAELYASEVELRQDITDLLSARRELRRARRNRKTRYRAPRFDNRISTKRKGWLAPSVENRIDAHLSRIEAVLRLLPVTKITVETASFDMQLLKNPDIAEKEYQEGEQLGFWNVREYVLFRDGHVCQHCHGRSKDPVLNVHHLESRRTGGDSPGNLITLCETCHKALHHGEITLKTKRGQSFRAETFMGIMRWEVLNRLKASHSKLEVNNTYGYLTKHARIKSGITKSHCSDAFCIAGNLGAKRLGEFLFQKQTRRNNRQIHKLSILKGGIRKRNQAPFEVNGFRLFDKVACKGEEGFIFGRRSSGSFDVRKLDGTRISAGISYKKLRLLEKRQTYLTEIRKEEALPPLPEGRGLRA

SEQ ID NO: 22440 - protein, 423 aa, unidentified
VLDTTKKPLTPCQPARARALLRDGKAAVWRTVPFTIILKVAMPDAIVKPISCKIDPGSKQTGLALVDSDGRVVFAAVLEHRGNAIKAGLESRRSIRRGRRARNTRYRQARFLNRIRPEGWLPPSLQHRVETTLTWVNRFRRLCGIVEIAVERVKFDMQLMRNPEISGVEYQQGTLLGFTVREYLLEKWGRKCAYCAVENVPMQIEHIHPKANGGSNAVSNLALACEPCNKKKGTLDIKVFLKNKPELLKKVVAQAKQSLSDAAAMNATRNKLFVELLNTGLPVETGTGAQTKFNRTRLDYPKEHWIDAACVGESGATVTLNPELKPLLIKATGHGTRQMCTTDKFGFPRRAAKGGKAVNSVSTGDYARIVQPKGKYIGSYVGRISSINTTTNFVTMKVFGKTISFNSKLVTIIQKADGYAYVH

SEQ ID NO: 22441 - protein, 500 aa, unidentified
MTSPLREEQTFGRSGYRQVRASLPLYRSVSCRGVWGHFEGAEHKKPSRLGEANFTAARRDSNGGNYMQRVLVLSSTRKPLMPCHPARARQLLRQGKAAIFRRYPFTIILKDREDGATQTIEVKIDPGSKTTGIALTAEFDRGKTVVWASEIEHRGQQVKKALEARSNVRRSRRNRKTRYRPARFNNRLRPEGWLPPSIMSRVHNVNTWALRIKNFAPVYSFVVETARFDTQKMQNPEISGVEYQQGDLLGYEVREYLLEKWQRRCTYCDKTGVSLEVEHIVPKSRGGSDRVSNLTLACRPCNEKKGNLTASEFGYPKVQTQAKQPLKDAAAINATRYAIGNMLKKHGLPISFWTGGRTKHNRTKQNYPKAHWIDAACTGETGSAVNLDPNMQILRIAAKGHGNRCMCATDKYGFPSRYRTNQKRHFGFQTGDIVRAKVPKGKYPGIREDRVTIRASGNFTIKTANKKVQEINHRYCSIIHRADGYQYLTVQKYLKQTGGG

SEQ ID NO: 22442 - protein, 415 aa, unidentified; identical to SEQ ID NO: 9067

SEQ ID NO: 22443 - protein, 448 aa, unidentified
MSVYVINQRKQLLMPTTEQKARLLIKQGKAKVIKIKPFIIQLLYATGETKQPITLGIDSGYNNIGFSAITDKKELIVGELKLLQNIKERLLERATYRRQRRSRLRYRKPRWNNRIKSKQKGWLAPSLQHKLNSHIKFIDSLYKILPITKCIIEIANFDIQKIKNPNIKGIEYQQGDMLGFWNLREYVLYRDGHKCQNLNCKNKDKNPILEVHHIKYKSFGGTNNPNNLITLCTKCHTSDNHKKGKFLYKWCQKGKKVREFKDATFMSIIRWYLVNQLKEKYNNVSFTYGYITKNHRIEYKIEKSHYNDAFCIAKGINQIRNNKIWQLQQCRRNNRSLEKFYDAKYIDIRTGHKVSGSELNNGRRTRNKNKNSENLKVYRGQKLSKGQRRIRKSKYFYQPNDLIKYEGKIYTVKGTQNGGKYVALKEIKKVPKVELIKPYKFQKGIVWN

SEQ ID NO: 22444 - protein, 461 aa, unidentified
VQPLYLGIDPGRTNIGVAVVKANGTAVFTAHLETRNKEVPKLMQDRKKARRARRTNGRRCRRQRRAKANGTISKKCVKQDTAQSKNPSKRAKEIGIIKRRLPGYKKDVLCIGIKNKEAKYTNRTRPEGWLTPTANQLLQTHINLVRKIQKFLPISDVVLEVNKFAFMRLDNPDIQKWQYQQGPLYQKGSLENAVSEMQEHHCLFCDKPIDHYHHVVPQSENGSNTIANIVGLCAEHHNLVHKDAAWQKKLAEEKVGLNKKYGALSVLNQIIPALTNKLSVLFPKHFFVTAGKSTHDYRATHGVSKDHWLDAYCIACSVLPSDVCDSNINNHMPYELKQFRRHARRALNNENMNRVYTLNDKAVAINRHKATEQEAASLEEFRKEHPNDVCKLKVKEHHPTYRNMNRNYPGSIFLVGKHVHIMQGIAGSKDGKATTYKDSNANSITASKCKFVAKNSGILFV

SEQ ID NO: 22445 - protein, 536 aa, Anaerostipes sp.; identical to SEQ ID NO: 8340

SEQ ID NO: 22446 - protein, 460 aa, unidentified; identical to SEQ ID NO: 18004

SEQ ID NO: 22447 - protein, 436 aa, unidentified
VQHPRVAAKGVTMRVFVKNMRGEPLMPCTQRKARLLLKAGKARICKYHPFTIQLDYATGETKQECTVGIDTGSKNIGIAVRSEDKVLFKGEVELRQDVKSNLDTRRIYRRSRRNRKTRYRKPRFLNRKRPDTWLPPSLENRIRHTFRWIDAFYLLVPSPCLHIEVGKFDTAKMIDPKIQGVDYQHGQTYGYYDVRYFVFARDHYTCQVCGKSRDKILQTHHIRYRSNGGTDRADNLITVCTDCHTGRNHQKGGILYQWQEENKKVRSYKEPPFMNILRQRIFQRYPYAHITYGSETTQRRKELCLGKTHYNDAIAISGIQTITEDPEEWLLIRQSRKKKRSLHEANPRKGRKKPNRTQERSSKNTPSYRNLYLNDKVSVLGRTGYISGFTNGGCYVKDTDGQYITLPGKTYKQVGIANVHRICHNNNWQYITKRAL

SEQ ID NO: 22448 - protein, 518 aa, unidentified
MANLKLIDELLEKTEYIYVLGIDGKPQMPTNRKVRVRSLFKSGMAKIVDTVPFTMQLLYENKPVLQPITIAEDPGRTNIGAAVLTQLGDLVFSAVVETRNKSIKKLMSDRKAHRQASRHGERKARQRLAKKYKSMIKAGMIMRKLPQYAADKFVACKVIKNTEARFCNRKRMPDWLTPTVNHLVQTHINLIKKVEKYLPITDVAIEVNRFAFMQMENPDASGVDFQNGPLKGFDDVKAAIREQQHGKCLMCKNDIEHFHHIIPRSKGGSNTIQNQVGLCKKCHAKVHTDAEFQAKLKDKKEGLIKKYGALSALNQAVPFICKELLKIYGAEHVHFCTGKDTSLIRSSLGYEKTKDNQMHEVDAYCIGLAAIGADKAKRPDFNNVFKIKQFRRQDRQLVHYQKERTYYLDGKKIATNRNPRFEQKGDALSDWYKEQIKIYGQYEAEKMRSRLTVKKSKRSYNTTKRLMPGCVFYYDGQRHVMTGQSSYGRYLRAYNCGTKDFPASKCQVIQFNAGLVFV

SEQ ID NO: 22449 - protein, 341 aa, unidentified
LRVFVLNKRGKPLMPCSPAKARLLLKEKKAIVVRRTPFTIQLTIATGESKQPVSLGVDAGYKHVGLSASTEKAELYASEVELRKDITDLLSARRALRQSRRNRKTRYRAPRFDNRIRTKRKGWLAPSVENRINAHLSRIEAVLRLLPITKITVETASFDMQRLKNPDISGKEYQEGEQLGFWNVREYVLFRDGHVCRHCHGRSKDPVLNVHHLESRRTGSDSPDNLITLCETCHKALHRGEITLKAKRGQSFRAQAFMGIMRREVLNRLKASYPELKVHETYGYLTKHARIANGIVKSHGADAFCIAGNLGAERLGEFFFQKQTRRNNRQIHKLSILKGGI

SEQ ID NO: 22450 - protein, 318 aa, Parasutterella sp.; identical to SEQ ID NO: 12461

SEQ ID NO: 22451 - protein, 413 aa, unidentified; identical to SEQ ID NO: 12499

SEQ ID NO: 22452 - protein, 425 aa, unidentified; identical to SEQ ID NO: 7553

SEQ ID NO: 22453 - protein, 406 aa, unidentified
LDANNKQLTPIKEQKAWFLIRKKRATLVSKYPMVIQLKKKIPDKEICKDEVRCGIDDGGLHVGVALVQKCQTRNKVVFKGVIEQRNDVKHLIDVRCGYRRYHRYHKRYRSARFNNRNSSKREERIAPSILQKRQATIRVINQLNKWINITNYWLEDVAIDIRALTDGYKPYRWQYQKSNRLDENIRKAVILRDGCKCMECGKSNCRLEVHHIKPRRLKGSSTLDNLITLCTKCHQKTESVEELYMDRYFALLNSSDNKNLNYAQHVMIGKKWLREQLSNLGMLYLTNGGDTANKRIDWDIAKSHSNDAICITDLRPDTCEIKEWAIKPMRRQSKAKTDNVLGIKHRDLVEYTFRNGETHRGYVTALYPEQNAINFQSPTKHCKKVNAKKCKVLWKYSKIYWLDNVG

SEQ ID NO: 22454 - protein, 420 aa, unidentified
LKVFVLNMRGKPLMPCSPAKARHMLKAGKAVVVRRTPFTIKLTIATGETKQDVTLGVDAGARHVGISATTEKEEVFASEVKLRQDITGLLADRLAFRRARRNRKTRYRSPRFNNRVRSKHKGWLASSVENRIQAHMSRIEAVCRLLPVTKIVIETASFDIQKIRNPEVEGTGYQQGDQLGFWNVREYVLFRDGHVCQHCHGRSRDKILNVHHLESRKTGGDAPNNLITLCETCHKAYHAGKIKLKVKRGQSFRAEAFMGIMRWTLLDRVRKTHPKLPVENTYGYLTKHKRIALGLPKTHCADAFCIAGNLKALRRGDFLFQQQTRKHNRQIHKCSILKGGVRKLNQTPFLVKGFRLFDKVKCKGRIGFIFGRRSFGYFDVRTLDGVRLSAGVSFKKLMLVEKRTTFLTQLRKECGASSPS

SEQ ID NO: 22455 - protein, 470 aa, unidentified; identical to SEQ ID NO: 2825

SEQ ID NO: 22456 - protein, 434 aa, Erysipelotrichaceae sp.
MKVFVLNMHGDPLMPCNPRKARILLRDKKAVVAKQMPFTIRLLYGSSGYKQPISIGVDAGSKHIGIAATTQKEVLFAEELRPRNDVVNLLSTRRQNRRARRNRKTRYRAPRFSNRVHSKHKGWLAPSVEVKIQEHITAIKRIQRILPITEVHVETAEFDAQRLKAMEEGKPLPVGTDYQLGEMHDSYNVRQYVLKRDNYTCQCCGKHGDNVKLHVHHLETRKTGGNSPGNLITLCEDCHKAIHAETKVLPVNKAKRRISLMRDAAFMGIMRKTLLERLRAELNIPVTGTYGYITKLYRDLYHIEKSHINDAIVISKNFTAAVDDVWYYAKAVRHHNRQIHKLTILKGGIRKRNQAPHVVRGCRLFDTVKYQNDLYFVFGRRTSGGMNIRTLDGNKVNNGYLSIKRFHILYSNAGTLLERRKAIPPMDESTGFLA

SEQ ID NO: 22457 - protein, 436 aa, unidentified
VQHPRVAAKGVTMRVFVKNMRGEPLMPCTQRKARLLLKVGKARICKYHPFTIQLDYATGETKQDCTIGIDTGSKNIGIAVRSEDKVLFKGEVELRQDVKSNLDTRRIYRRSRRNRKTRYRKPRFLNRKRPDTWLPPSLENRIRHTFRWIDAFYLLVPSPCLHIEVGKFDTAKMIDPKIQGVDYQHGQTYGYYDVRYFVFARDHYTCQVCGKSRDKILRTHHIRYRSNGGTDRADNLITVCTDCHTGRNHQKGGILYQWQEENKKVRSYKEPPFMNILRQRIFQRYPYAHITYGSETTQRRKELCLGKTHYNDTIAISGIQTITEDPKEWLLIRQSRKKKRSLHEANPRKGRKKPNRTQERSSKNTPSYRNLYLNDKVSVLGRTGYVSGFTNGGCYVKDTDGQYITLPGKTYKQVGIANVHRICHNNNWQYITKRAL

SEQ ID NO: 22458 - protein, 406 aa, unidentified; identical to SEQ ID NO: 8741

SEQ ID NO: 22459 - protein, 462 aa, unidentified
MSVLVIGRNGRALMPTNPRKARLLLKKKTASVVCRHPFTIQLLYKTGCATQEGCIGIDTGSQHIGVGITCGDRVILKDEHALRSSMEKRSLLATRTVMRRGRRYRKVRYRKPKWRHHTKRMYFEKANRRGQHWRKVKTTTQSPRLKGWLPPSLQSKCDHHFRIIDRYLKYLPDPITRNLVIEAGRFDMARMNDPTIHGEMYQRGPMYDAENLRAYIFARDNYQCACCKAKAGTTRKADGTTVKLVAHHILFRSRGATDNPKYIISVCDHCHTTKAHQPGGILYSWMENTKKVARGLRDATFMNILRKRLFARYPQSAFTYGNITATDRKQLRLPKSHANDAVAISLFGKEASTVKNICQTMHYKQIRKSKRSLHEAIPRKGRKNPNTKAVRNKKNTTQVNGFKLWDSVLADGKKLFICSFTGTSAYLIDKNGCYISQPGKTYKQWPLSKLKRLHPNGNWLMA

SEQ ID NO: 22460 - protein, 431 aa, Phormidium sp.; identical to SEQ ID NO: 8638

SEQ ID NO: 22461 - protein, 393 aa, unidentified
LQFYRKEHGIMQYVYVLNKHGEPLMPCSPGKARLLLKQQKACVVKRTPFTIKLLFGSAGYKQPITLGVDAGSKHVGLSASTEKRELYSEEFTPRSDVVELLSTRRQNRRSRRNRKTRYRVPRFDNRVHSKHKGWLAPSVEVKIQEHITVIKHICKILPISLVRVETAEFDTQRLKAMLAGKPLPVGTDYQLGEMYDEYNVRQYVLKRDHYTCQCCGTHNTAKKVVKLHVHHLESRKTGGNAPSNLVTLCTTCHKNLHKGRVTLDGKERGKPLRDAAFMGIMRKTLMVRLKEELPIPVQGTYGYITKMRREQNDIKKSHVNDARCISKHPLAEPCSVCYRTKAIRHHNRQTHKANFSKGGIRKRSQMPYVVEGYRLWDKVLYKGQECFVSGRRA

SEQ ID NO: 22462 - protein, 520 aa, unidentified
MMVLVQNKDGTLLSSCHPARARILLKKGMAKVVATYPFTIKLTYRVKNPVFLPTRVILDDGKTCGLGVVQENRTHNLVLCKAEMKTRGEEISDNLKDRRTCRAQRRNRRNKKRGREDEIKIRYRKKKQEYPASIRADVEAKINAVKRLMKMYPVTEIVLEPVKLDIVKVINPTVKGKDYQRGLSYGIEADSRNRKRRLAILKRDGYRCLYCGSPVTGENAHVHHFVQRKHGGSKRYDIQGTLCEKCHTSVITGELALAFDLEKYPSVRAAGRAMHGRYLLERELKKLGVPVAIRYGYETKELRERFGLPKSHGDDAVVLGCNPEKKLVDRSTVYKIKLHARHGGRKLFDANPGVAAYRGQADRQPHVDRSHMAVDDHDHETNRRNRSYRRHVRNKYYKKLKAEGKFNYELLPGKTRLNEIFTVNRAILLTESGPVLVKNQRIRKWRYPYPWPERGRVIERYDLVKTQKGDIGIVTSLMSDCTVRVDFVRKREGYKTNFSFYKPEMLTIIQKGSSQTWVIQ

SEQ ID NO: 22463 - protein, 411 aa, unidentified; identical to SEQ ID NO: 3917

SEQ ID NO: 22464 - protein, 418 aa, unidentified; identical to SEQ ID NO: 7605

SEQ ID NO: 22465 - protein, 417 aa, unidentified; identical to SEQ ID NO: 9081

SEQ ID NO: 22466 - protein, 434 aa, unidentified
MGFLTTWARRKILPKGKVAEMPKIKKYAFVLDAKRKQLDPTIEQNAWRLVRQYKARLVSKFPMIIQLNKVMDNPNNDEIRCGIDDGANHVGMALVQKCQTRNKVLFKGTIEQRKDVKHLLTVRRGYRRYHRYHKQYRSARFLNRASSRRSGRLMPSIIQRKQAILRVIDRLRQWVRIDGYWLEDVKIDIRALTDGYKPYRWQYQKSNRLDNNLRLAAIHRDGCKCVECGKTKTRFEVHHITPRKTGGADTISNLITLCPKCHAKTFGRESQFADRYYALIGSTGHVEGLDDAQRVMQGKHWFREQLQQRGSLVLTTGGNTANKREDWDIAKTHSNDAVCITDLKPENIDIEEWTIKPMRRKNKAGVDEVCGFHHRDYVTYTYRNGETHTGYVTAMYPDKNQLNFQSPTKHCKRVNALKARLLWRYDKIYWFKCA

SEQ ID NO: 22467 - protein, 437 aa, unidentified
  REGION 1..437: note = IscB polypeptide
LRAFVLDMHKNPLMPCHQARARKLLKSKKAKVFRMFPFTIILQQETTNQVQKVEIKIDPGSKTTGVALVSNQKVIWACNLSHRGSLIKKALLQRRQVRRSRRFRKTRYRQARFLNRKRISEWLPPSLMSRVDNVSTWVQKLNSLVRLTSACIETVRFDTQKMQNPEISGIEYQQGELVGYEVREYLLEKFNRKCVYCGAENIPLEIEHLHPRSLGGSDKISNLALACHKCNQKKSNTPLELFVKDKTNLAKIKATAKAPLADTAAVNATRYAIGRAVKEIILDTSFWSGGRTKCNRTKQNYQKDHWIDAACVGTTGENIWLDPNDNILLVQAAGRGNRQKCLVNKFGFPCSKPRTIKRVFDFSSGDICRLDKSKGKDAGRYVGKISVRVRGDFDIQVPKEKNKTGKVGANWQFFKLVQRADGFAYQMAGTTARAATT

SEQ ID NO: 22468 - protein, 425 aa, Nodularia sp.; identical to SEQ ID NO: 2911

SEQ ID NO: 22469 - protein, 526 aa, unidentified
MLWKFYRLIGRTSVRPISLAYRKKELFMRPVYVLDMNGKPLMPTCRFGKVRRMSKSGEVKVVDTLPFTVQLDRPTKTHVVQSVTLGCDPGRTNIGLAAVRSDGTDLYRSHCETRNKEIVDLMDARRAARRASRRGERLARKRLAAKHETATTFPDGRKLPGYEKPIMLKDIINTEARFNNRVRPAGWLTPTATQLLRTHLNLIKRISRIFPVSDIALEINKFAFMQLDEPDKNKWNIDFQHGPLYGTGGLKAAVRQLQNDTCLLCQENVIEHFHHLIPRSKRGDNTINNIAGLCQKCHEAVHKSADTAEKLSTLKKGQTKRYGGTAVLNQIIPKLVEELGKTYHEHLHLTYGWQTKEFRTKHKLEKTHDTDAYCIAAGTMQTVNPNIRTDVYEIKQFRRHNRANIHHQTERTYKLNGQTVAKNRRKRTDQKTDSLAEWFENTVKQYGQQKAEHLRAELKVRKSTRYYNSKDRMMPGAVFQYEGNRYVVTGQLSGGQYFRAYGKGNRNFPAKKIRIISLNRGLVYVA

SEQ ID NO: 22470 - protein, 423 aa, unidentified; identical to SEQ ID NO: 4062

SEQ ID NO: 22471 - protein, 430 aa, unidentified; identical to SEQ ID NO: 8226

SEQ ID NO: 22472 - protein, 453 aa, unidentified; identical to SEQ ID NO: 12227

SEQ ID NO: 22473 - protein, 481 aa, unidentified
MWTTVLRDEKPYGRSSALPVRECVSITKKRGHRMVAVLSKTGIRLMPTSSYRARKLLAKKKAVICGYRPFTIRLTERETGDVQPVELAVDTGYFHVGNSLKTAKHELAAVEIRTLMDEKQRYDDRRQYRRMRRSRLRYRAPRFDNCRRPEGWLAPSIQGRMEQNLAFLRRVLSVVPVTRIVMEMGQFDTQVLKAVEEGRPLPEGTDYQQGERYGIATLREAVFTRDNYTCQCCEKTVHDGVILHVHHIVYRSQGGTNRMGNLITVCEKCHTPKNHKPGGKLYKWNPTVKSFKGATFMTAVRWIMYRSVKESFPDVDVRITYGAKTKLQRRTLDITKSHVNDAYVMGDFHPKHRARPVILQKKRRNNRILEKFYDAKYIDARDGSKKTGQQLFNGRTNRNHNTDTENLRLYRGMKLSKGKRAIRTTRYKIQPHDILVYQGQEMEASGCHNKGTRVMTTAKKSLPIGKVRVRRYSGGYYAVAE

SEQ ID NO: 22474 - protein, 512 aa, unidentified; identical to SEQ ID NO: 3720

SEQ ID NO: 22475 - protein, 412 aa, unidentified
MVYVISQNGQPLMPTENHAKVRILLKNKKAKVIKKCPFTIQLAYDSTNYTQDITLGVDSGSKHIGLSATTEDKVLFESDVELRNDIVNLISTRRQNRRTRRNRKTRYRKPRFNNRKRNNGWLAPSIQNKVNSHLTVVRKVHEILPITKIIVEVASFDIQKIKNTAISGEEYQKGEQLDFWNVREYVLFRDGHTCQCCKGKSKDKVLNVHHIESRKTGGNAPNNLITLCETCHTGYHKGIVKLPKTIHRGMSFKDATFMGIMRWAFYNKLKEIYPNVNLTYGYITKNTRIKNNLPKEHYIDARCISKHPNAVSDGTVYYQKKVRCHNRQIHKSTILKGGYRKRNQAPYTVMEFRLYDKVMWKGQKCFIFGRRSTGRMDIRLLNGTKINTSVGHKNLRLIEMRKNYLIEQRKVG

SEQ ID NO: 22476 - protein, 469 aa, unidentified
  REGION 1..469: note = IscB polypeptide
MLRTKSLQVELKNTLQDAPLVLNSVSPVLNREETLSVQDKVLVCNSPEVDLLQHAGGQNLRVSDNMHVFVLNKRKEVLMSTSCRNARLLLKSGKAVVIKRFPFIIQLTYTTGENKQKITCGVDSGYSNIGFSCITSTKELIRGTVKLDNFTSKHLCEKRMYRRNRRNKLRYRSPRFLNRRRSDNWLPPSIKRRYQTHINLINKLKQFLPISHVTIEIGNFDIQKFNNPDINGKGYQQGNLYNYSNLKSFVLSREKHICQLCNKSDLKNDKWKLHHIILKSHGGTDKADNIALLHEKCHKKLHKQNLHDKLKKNKQYKESTFMNIIKSRFKNSLNCKLVFGYETYCRRNELKLKKSHSNDSFVIAGGTNQKKSMKYSIKQRRRNNRTLQLNRKGFKPSIRRKRYKLQPYDLVKIDNNIYDVIGTHCLGKRVKVKSEKNRKNEISIKKIDWHFNNNSLIWKIERSGNSSRP

SEQ ID NO: 22477 - protein, 512 aa, unidentified; identical to SEQ ID NO: 17474

SEQ ID NO: 22478 - protein, 408 aa, unidentified; identical to SEQ ID NO: 4810

SEQ ID NO: 22479 - protein, 412 aa, unidentified; identical to SEQ ID NO: 4932

SEQ ID NO: 22480 - protein, 440 aa, Clostridium sp.; identical to SEQ ID NO: 5468

SEQ ID NO: 22481 - protein, 431 aa, unidentified; identical to SEQ ID NO: 4377
  source 1..431: note = uncultured cyanobacterium

SEQ ID NO: 22482 - protein, 340 aa, unidentified; identical to SEQ ID NO: 21471

SEQ ID NO: 22483 - protein, 417 aa, unidentified
MPCSPAKARLLLKEKKAIVKRRTPFTIQLTIATGESKQPVTLGVDSGYKHIGLSATTEKAELYASQVELRQDITDLLSARLALRRSRRSRKTRYRAPRFNNRVASKRKGWLAPSVENRIAAHMSRVEAVMRVLPVTAITVETAAFDTQLLKDPDIAGGAYQQGEQLGFWNVREYVLFRDGHVCQHCSGKSKDPVLNVHHIESRRTGGDAPNNLITLCETCHKAFHRGEIKLKVKRGKSFKAETFMGIMRWTLFERLKKAHPELSVRNTYGYLTKHKRISHGIAKSHCADAYCIADNLGAKRLEGFFFQKQTRKHNRQIHKLSILKGGLRKKNQAPYEVKGFRLFDKVICKDEEAFIFGRRSSGSFDVRRLDGTRISAGISYKKLRLLEPRTTYLTEFRKEAALPPLHKCRGFRAEFL

SEQ ID NO: 22484 - protein, 423 aa, Arthrospira sp.; identical to SEQ ID NO: 3221

SEQ ID NO: 22485 - protein, 435 aa, Moorena sp.
MQNYVFVIDTNKQPLNPISPKKARRLLDKGKAAVFRMYPFTIILKTAIRQSRRCANANPTISPCQIKIDPGSKVTGFALVQDDQVIWGMELEHRGGLIKKKLESRSAVRRGRRNRNTRYRKPRFLNRKRPEGWIAPSLEHRVLTIETWVKRLIKFCPINEIWVERVKFDTQKMQNHEINGIEYQQGDLAGYEVREYLLEKWGRECAYCGKQNIPLQIEHIHPKSKGGSDSAKPTLRERVNNLCLACEKCNQRKGNRPIEEFLKKKPGLLQKIKNKAKQPLSDAAAVNTTRNRIVKVLKEVKPVVTGTGAQTKYNRTKLGLSKQHWIDAACVGDIKTLVLRTSQPLLVTCKGQGGRQKAALNKYGYPIRHNPLKPIKGWSSGDIAKNLLTGEFGRVNPRSKSNSFNYTAPGKKAISLHLKNLLRVHRKDGYSYGFC

SEQ ID NO: 22486 - protein, 456 aa, unidentified
MSTCVCVLSNSGERLMPTFRFGKVRRLLKDGKAKIVKHHPFTIQLLYDSKANTQPIEICEDVGYNYIGISVKSESHEYVSAQYDTLQDEKEHHDDCRKYRRTRRNRLRYRKPRFDNRKRSEGWLAPSLEHKKQLNIRLIERYVSVIPITRATVEVGSFDTMLLQAIQKGESKPEGVDYQKGPRYNLATLREAVFYRDNYTCQVCGRKIADGAILHMHHMFYWKGRHGYQLDELVTACEKCHTPANHQKGGKLYGFGKDKKFANLSGAAFMNAVRWQIVDALHATYGKEFVTITYGAMTKEKRIALQLEKTHNNDAYAMGDYHPACRCKFRHYQKRRRNNRVLEKFYDATYIDARTGNKAKGKELFNGRISRNHKKDSENLHKYRSKKVSKGRRSIRRQRYAIQPYDTVRLENKTYITSGCHNKGTRLLIPANGKSKSVAISKVQVVCHAGAWIQII

SEQ ID NO: 22487 - protein, 416 aa, unidentified
MVYVLDKNGQPLMPTDRHRKVRLMLQSGQAKVIKRCPFTIQLTYNTGHQAQEISLGIDAGSKHIGVSATTKIKVLYEADVELRNDIVNLLSSRRELRRGRRNRKTRYRQAKFNNRRRGNGWLAPSIRQKIGTHLTVVENICKMLPISRIMVETASFDIQKIKNPDIQGAEYQQGDQLEFWNVREYVLFRDGHTCQCCKGKSKDKILNVHHIESRKTGGNAPNNLITLCEPCHTGYHKGTVQLPKAIKRGMRFKDAAFMGIMRWAFYEALKQQYEPVGTPVHNTYGYITKHTRIAYNLPKEHYVDARCISGNPEASSNGEYYYQKKVRCHNRQMHKLTILKGGIRKQNQATYLVKGYRLFDKVSYQGKGYFVFGRRQSGFFDIRTLSGEKVNKGSLNCKKLKFIATRTYYLTERRAV

SEQ ID NO: 22488 - protein, 406 aa, unidentified; identical to SEQ ID NO: 2866

SEQ ID NO: 22489 - protein, 407 aa, Bacillus sp.; identical to SEQ ID NO: 16579

SEQ ID NO: 22490 - protein, 414 aa, unidentified; identical to SEQ ID NO: 5310

SEQ ID NO: 22491 - protein, 413 aa, unidentified
LKVFVLNMRGKPLMPCSPAKARHMLKAGKAFVVRRTPFTIKLTIATGETKQDVTLGVDAGARHVGISATTEKEEVFASEVALRQDITGLLADRLAFRRARRNRKTRYRSPRFNNRVRSKHKGWLASSVENRIQAHMSRIDAVCRLLPVTKIVIEAASFDVQKIKNPTIEGTDYQQGDQLGFWNVREYVLFRDGHICQHCRGRSKDPILNVHHLESRKTGGDAPNNLITLCETCHKAYHAGKIKLKVKRGQSFRAEAFMGIMRWTLLDRVRKTHPKLPVENTYGYLTKHKRIALGLPKTHCADAFCIAGNLKALRRGDFLFQQQTRKHNRQIHRCSILKGGVRKLNQAPFLVKGFRLFDKVRIGGQIGFVFGRRVRGTFNIRRLDKTVIGTDINCKKLSLLETRKTFLTELRKE

SEQ ID NO: 22492 - protein, 464 aa, unidentified; identical to SEQ ID NO: 6574

SEQ ID NO: 22493 - protein, 451 aa, unidentified; identical to SEQ ID NO: 2593

SEQ ID NO: 22494 - protein, 413 aa, unidentified
MTNYAFVLDANGKQLSPTKEQKAWFLIRKKRAILISKYPMVIQLNREILDDKVCKDEIRCGIDDGGLHVGVALVQKCKTKNKTIFKGTMEQRNDVKYLMEVRKGHRCHHRYYKRYRQARYNNRISSKRKGRVAPSILQKKQAIIRVINQLNKWINITNYWLEDVAIDIRALTDGYNPYRWQYQKSNRLDENIRKAVILRDGCKCKECGKSKCRLEVHHIKPRRLNGSNTLDNLITLCEKCHQNTEGREELFMKKYFSLLNSSDNKNLNYASHVMIGKNWLREQLSNFGILYLTNGGDTGNKRIDWNIGKSHCNDAVCITNLNPDTCDVKEWIMKPMRRQSKAKTDNVLGIKHKDLVEYTYKNGETHRGYVTALYPKQEALNFQSSRKHCKKVNAKKCRLLWKYQKIYWLESET

SEQ ID NO: 22495 - protein, 396 aa, unidentified; identical to SEQ ID NO: 4508

SEQ ID NO: 22496 - protein, 415 aa, unidentified; identical to SEQ ID NO: 16389

SEQ ID NO: 22497 - protein, 408 aa, unidentified; identical to SEQ ID NO: 4079

SEQ ID NO: 22498 - protein, 417 aa, unidentified
MFVYVISKDGQPLMPTIRFGKVRRLLRDKKAKVIRSCPFTIKLLYEPESLVVQEVILGQDTGSKHVGTACVANNKVLYQSEVVLRDDIKKKMDRRRTFRRSRRQRKTRYRKPRFLNRTNSAKKDRLSPSARSKVQSHIDEIEFCKKILPVSKIVLEVSQFDTHLMKNPALINEKVKRWGYQQGFNYEYSSRREAILNRDSYTCQCCGKKHVRLEVHHIIFRSLGGTDDERNLITLCEKCHKAIHDGILILTKKPKKLNLKHATQMSIIRSQLLKIYPDAIETFGFVTKENRNNLYLQKGHFIDACVIASGGKEFKQSNWLFRKRRVAKQNRQLCKGVRGEKKIPAGKVFGFKRFDKVKYLKEICFIKGRRNNGAFALMDIDNNAIDFRSKGGRKEPSYKLLERLNAKRSALCINQRI

SEQ ID NO: 22499 - protein, 413 aa, unidentified
MRGKPLMPCSPAKARHMLKAGKAFVVRRTPFTIKLTIATGETKQDVTLGVDAGARHVGISATTEKEEVFASEVALRQDITGLLADRLAFRRARRNRKTRYRAPRFNNRVRSKHKGWLAPSVENRIQAHISRIEAVCRLLPVTKIVIETASFDIQKIRNPEVEGTGYQQGDQLGFWNVREYVLFRDGHICQHCRGRSKDPILNVHHLESRKTGGDAPNNLITLCETCHKAYHAGKIKLKARRGTSFRAEAFMGIMRWTLLDRVRRAHPELPVENTYGYLTKHNRIALALPKTHCADAFCIAGNLNALRRGDFLFQRQTRTHNRQIHKCSILKGGVRKLNQAPFLVKGFRLFDKVKCKGGIGFVYGRRSSGFFDVRTLDGVRLSAGISYKKLMLVEKRTTFLTQLKKEHGASSPS

SEQ ID NO: 22500 - protein, 267 aa, unidentified
MVYVQDIDGKPMMPTTRHGKVRRLLKDNKAVVVNTCPFTIKLTYKTSDYKQEIVLGVDAGTKHVGLSATTKSKELYSGEVILRNDVVELLSTRRESRRARRNRLRYRKPRFENRVKSKRLGWVAPSVRHKVDAHIRVIDNICSTLPISRIIVEIAQFDTQKIKNPDISGNEYQEGDQLGFWNVREYVLARDGHKCQHCKGKSKDPILNVHHIESRKTGGDSPSNLITLCETCHKEYHKGNIDLKVKRGKSLRDAAVMGIMNGSCTRS

SEQ ID NO: 22501 - protein, 406 aa, unidentified; identical to SEQ ID NO: 9317

SEQ ID NO: 22502 - protein, 444 aa, Desulfotomaculum sp.
MRTAKDYETQNRVFVLDKHHRPLMPCHPARARELLRKGKAVVHKLYPFTIRLKDKTGGATGPLRLKIDPGSKTTGLAIIRESDGYILWAADLHHKQFVTVNKDGKPVTVVGKRASLRRSRRSRKTRYRPRRINNRRRSEGWLPPTVRAKADCVLGWVEKLLRLCPITAISIETARFDTQKLQNPEISGVEYQQGTLFGYEVREYLLAKYGRECQYCHGKSKDPVLEIDHIVPRSRGGSDRVSNLTLACRTCNLDKGNKTAEEYGHPEVQAEAKKPLKDAAHVNAARWYIWERLKAISSASGLELEMGTGGRTKHNRTIQGLPKAHYLDAACVGASTPELKNTYIKPLEIRAVGRGNRRMARVDAYGFPKGHRSRKKVHFGFQTGDIVKAIVTKGKYSGVYKGTVAVRASGYFDIKDVHGKVIVQGINYKYMRLLQRADGYTYAI

SEQ ID NO: 22503 - protein, 494 aa, unidentified; identical to SEQ ID NO: 12763

SEQ ID NO: 22504 - protein, 386 aa, unidentified
YGSSGYTQEVILGVDAGSKTIGMSTSTKKEEVFAADVTPRNDVVDLLSTRREFRRARRNRKTRYRKPRFNNRVRSKHKGWLAPSVEVKIQEHITSIKMVCRILPVSKVVVETAEFDLQLLKAIEEGKPVPQGEDYQQGEMYGHYNVRQYVLWRDNYTCQCCGAHLTKKKEVRLHVHHLESRKVGGNAPGNLVTLCDRCHEKLHKGLITEKDLKKRKHRSTRDATFMGIMRKTLMQRLCSELPIPVAETRGYITKATREKLLVLPKSHTNDALAIAQGKHGFNVGYLPGIAQIDKIYTIRPVRHHNRQLHKATILKGGIRKSNQAEKYVFGYRLFDKAQFNGQDCFIWGRRTSGYFVVKTIDGKVIHNSASFKKLRLVERASNYLIA

SEQ ID NO: 22505 - protein, 469 aa, unidentified
MYKGELSTMSVLVIGRNGRPLMPTTRRKARILLKENKASVICRNPFTIHLWYKTGCATQEGSIGVDTGSQNIGIVVTAGDRQILKAEHILRSSMEKRELIEARAAFRRSRRYRNTRYRRPKWKHHTKRVYNEVPDSKGRHWRKVKISTQSPRPEGWLPPSLQSKCDHHTGIIDRYLAFLPDCISKNLVIEAGRFDMARMQDPSIHGEMYQRGPMYDAENLKAYVFARDGYRCTCCGQKAGSIRKDGTAVKLLVHHVLFRSRGATDNPKYLASVCDACHTAAAHRPGGKLHQWMLEAKEFTRGLRDATFMNILRRRLFTKYPEAAFTYGNITAADRKRLLLEKSHANDAVAISLFGKDVSSVKGTCQTLHYRQVRRYKRSLHEANPRKGRKAPNTKAVRNAKNTSEVKGFHLWDTVKAGGQKLYITGFTGTSAYLTDQYKNYVSPPGKNYRQWTLSKITRLHPNGGWIMF

SEQ ID NO: 22506 - protein, 453 aa, Erysipelotrichaceae sp.; identical to SEQ ID NO: 11367

SEQ ID NO: 22507 - protein, 327 aa, unidentified
MAIFVLDKKKQPLMPCSEKRARLLLARGRAVVHKRYPFTIRLKNRVGGEAQPLRLGIDPGSKTTGLALIREPDSQQRHVLCLFELIHRGFQIKKALQQRAAFRRRRRSANLRYRAPRFNNRIKPKGWLAPSLQHRVDTVMAWVNRLSKSAPITGISQELVRFDTQKLESPEISGVEYQQGTLLGYEVREYLLEKWGRECAYCGTADTPLEIEHVVPRSRGGSNRVSNLTLSCHPCNAEKDSQTLTDFFATNKGLKKRLKANGLSADAQLERVQRQLKQPMRDASAVNATRWALFSALKTTDLPVAVSSGGRTKYNRQRLNIPKTHAL

SEQ ID NO: 22508 - protein, 363 aa, unidentified
MPDKVYVISRLGHPLMPCSPAKARHLLDDKKAKVVKRMPFTIRLLYGSTKYIQPIILGVDAGSKTIGLSASTAKEEVFAAEVMPRNDVVENLSTRREFRRARRNRTTRYRKPRSDNRVRSNHERWLAPSVKVKIQEHITSIKRVRTILPISKVVIETAEFDLQLLKAIQEGKPIPEGEDYQKGEMYGSYNVCQYVLWRDNYTCICCGVRGTPKNPVRLHVHHFESRKYGGNAPDNHGTLCDDCHKKFHLGIITDVKLKTRRRQSTRDAAFMGIMRKTLMWRLRTELFIPVAETKGYITKATREKLLVLPKSHTRDALAIAQGRHGFGIKEYAYVEPANHIYTVRCWRSWVWKTMRTITKKLFP

SEQ ID NO: 22509 - protein, 515 aa, unidentified
MIPNERRHLMPYIYVIGMDGKPQMPTKRRRHVQKLLDTGKARITERVPFTIQLLYDNDPVLQPVILAEDPGRTNIGLAALDLKGNLLLSAAVETRNKEIAKLMEKRRQCRRASRNGERKARQRLAKKYGTMIRGGMRMRKLPQYAADAFITCKVIRNTQARFCNRRRPDGWLTPSARHLVQTHINLVHKVQKYLPVTDVVIEVNRFAFMQLEDPAICGVDFQTGPLKGYDDRDAAVYDLQDGKCLMCKHEITQYHHIVPRSRNGSNTIGNIAGLCDQCHDRVHKDADFAEQMKEKKEGMDKKYGALSVLNQAIPFICKQLETEFGRGHVHYCTGRETSLVRRSTGYQKTKKNQLHEVDAWCIGALALAEIPENVPDFKEVHLIQQFRRQNRSLVNAQTERVYKLGGRMVAKNRKKRTGQETDALEDWYNRQVETYGKQEADCMRSRLKVTKSERRYNNPGRMMPGAVFLYEGVRYVMRGQHCNGAYLQAVGMGSRDFPARKCKILTRNTGLVFVS

SEQ ID NO: 22510 - protein, 427 aa, unidentified; identical to SEQ ID NO: 3550

SEQ ID NO: 22511 - protein, 451 aa, unidentified; identical to SEQ ID NO: 4938

SEQ ID NO: 22512 - protein, 442 aa, unidentified
MSTSVFVLDKKHRPLMPCHPARARRLLRAGRARVVKRFPFVIRLVDRTVEQSEVQPVLIKLDPGSRETGAAVVRDDGKKRHHALAFFVIEHRGGAIRDALKARSAFRRRRRSQNLRCRSPRFLNRVKPKGWLPPSLRHRVETTLSFVRRMCRYLPVSGIAAELVKFDSQKLQTPEVSGIEYQQGTLFEYEVREYLLEKFGRKCVYCGAEGVPLNIDHVVPRAKGGSNRVSNLVLACVSCNQKKGARSLEDFLKGKPEVLARVRRELKTPLRDAAAVNATRWVLFNELKATGLPVETGSGALTKFNRHAFGVEKEHWLDALCVGRLNGAVTRKGLNVLEIRCMGRGSRQRTRLTKYGFPRGYLMRQKCVHGFATGDMVEANVPKGKKAGLWRGRVAVRVSGSFNIQTPKGVIQGVGWKHCRLISHNDGYGYAWLGHAPHSSPA

SEQ ID NO: 22513 - protein, 416 aa, unidentified
MPCSPAKARHLLDEGKAKVKKRTPFTIRLVYGSSGYTQEVILGVDAGSKTIGMSASTTKEELLSAEVKPRNDVVDLLSTRREFRRARRNRKTRYRKPRFDNRVRSKHKGWLAPSVEVKIQEHITAIRRVCGILPVSKVVVETAEFDLQLLKAIADGKPVPQGEDYQQGEMYGHYNVRQYVLWRDNYTCQCCGAHPTKKKEVRLHVHHLESRKVGGNAPGNLVTLCDRCHEKLHKGLITEKDLKKRKHRSTRDATFMGIMRKTLMQRLCSELPIPVVETRGYITKATREKLLVLPKSHTNDALAIAQGKHGFNASYLPGIVQSDKIYTIRPVRHHNRQLHKAAILKGGIRKSNQAEKYVFGYRLFDKVQFNEQDCFIWGRRTTGIFTIKTINGKMIKDGISFKKLKLLEKSTSYLIA

SEQ ID NO: 22514 - protein, 408 aa, unidentified
MVYVQDIDGKPMMPTTRHGKVRRLLKANKATVVNLCPFTIRLTYATSGYKQEIVLGVDAGTKHVGLSATTKSKELYSSEVILRNDIVELLSTRRELRRTRRNRLRYRKPRFNNRIKSKRTGWVAPSVRHRIDAHIRVIDNICSTLPISRVIVEVAQFDTQKIKNPDISGDEYQEGDQLGFWNVREYVLARDGHKCQHCKGKSKDPILNVHHIESRKTGGDSPSNLITLCETCHKEYHKGKIDLRVKRGKSLRDAAVMGIMKWKLYEELKSRYDNVSMTFGYITKYNRIKYGIEKYHISDAFVISKNFNALRLEYHYKVRLVRRHNRQIHKQKVLKGGAKKPNQSPFEVFGFRLFDRVMFEGNYYFIFGRRKSGSFNIRDINGGNQRNVTYKKLKLSIGKRFMIQKEMN

SEQ ID NO: 22515 - protein, 380 aa, unidentified
LVSKYPMVIQLMKEIPENEICQDEIRCGIDDGGLHVGIALVQKCKTKNKVVFKGTMEQRNDVKHLMEVRRGYRRYHRYHKRYRQARFDNRKSSKREGRIAPSILQKRQATIRVIHWLNKWINITNYWLEDVSVDIRALTDGYQSYRWQYQKSNRLDENIRKAAILRDGGKCMECGKSNCRLEVHHIKPKRRNGSNTLDNLITLCESCHQKTEGQEELYMDRYFSLLKSSDNKNLNYAQHVMIGKMWLRKQLSGLGVLYLTSGGDTANKRIDWNIEKSHTNDAVCITDLQPDTCDIKEWAIKPMRRQSKAKTDHVLGIHHRDLVEYTFKNGETHRGYVTALYPEQKAINFQSPTKHCKKVNARKCKLLWNYSKIYWFENAS

SEQ ID NO: 22516 - protein, 419 aa, Moorena sp.; identical to SEQ ID NO: 2828

SEQ ID NO: 22517 - protein, 568 aa, unidentified
VLALLQVLVILRVQVQLIRLYSDISSEMIYNLVPTRERSFMKQKKQKVMIYILNKKGKPLMPTTRCGHVRKLLNSKKAVVVNSNPFTIRLKYDTPNGVQDVFAGIDSGRENIGSGASNEDGDCLYLGELKTSNKSIKLKMTERAGFRKERRRHDRQNKQRKARKDHTEIQNGNADICRTTISCKSVQISYPAAEKSVTHKIIRGKEGKFANRHRDEGWITPSARQLVQMHMNDLRSICKILPISHVTLERVAFDFQKLENENIKVWEYGKGKLYGYDSPEEYIHDVQNGKCLVCGKPHIDYLHHIIPRSKGGSDKVSNIAGLCYDCHYGPMGVHNCQNTQDRLPELKSEANKQYKVSLLNSVMPVLIEEMDKFCEANSIIFSICEGHDTAKVRDMYDLQKDHCIDGFAISLVDRNVKSVDVMPDRIYQKQRYKKKSKNIIQKRNCREYYDDKKLVAVNRHKGTDQKADSLEEYMNTYAETHTTDECKKHFDSLTVKPARRTYTFHKKGCICPFHIGDKVRYEKKNKIKGNTKVETFICESIHFYKDENKAKVEHNKTKSKRMKFCRVL

SEQ ID NO: 22518 - protein, 265 aa, unidentified
VTDVSTVYVLNKDGKPLMPTTRCGHVRYLLKEKKARVVKTKPFTIQLLYETNDVVQPLYLGIDPGRTNIGVAVVKADGTAVFTAHLETRNKEIPKLMKKRKDSRRARRTNGRRCRRQRRAKANGTISKKCVKQTTAQNGSVSKRAKKIGVIKRHLPGCEKEVLCIGIKNKEAKFSNRTRPEGWLTPTANQLLQTHINLVKKIQKFLPISDVVLEINKFAFMRLDNPNVQKWQYQQGPLYQKASLEEAVSEMQEHHCLFCKKKIDH

SEQ ID NO: 22519 - protein, 412 aa, unidentified
  REGION 1..412: note = IscB polypeptide
MQKTYIQNKDGEPLMPTTRCGAVRRWLRDNKAVVIHLCPFTIRLNFDCENNTQEVIIGLDTGAVNVGCSAVSNNKCLYASETKLRTDISNKMQRRAMYRRSRRTRNTRYRQPRFDNRKSKRQLPPSLQSKTDSTVKVVRQLAKILPISKVIVEIAKFDTQKLQNPDIKGKEYQKGVTEGYDNVRAYVFERDKYTCQICKKQGGILQTHHIKQRKDGGTDRPENLATVHKDCHTDFHLGQIEYKFRKPKEYCMATQITILKNFIVKELKKDFDVKVTFGHITKRNRMRLNLPKSHWSDAVAICSPKKIERINTMFKRVCISRGRYQQTKGIRSEKKLPSGKVFGFSIWDKVELPDKRIGFIKGRRIRGDFEICDINGKKFEKSFKYSNLNIIQYARGGVSIPHTTKVMCTLET

SEQ ID NO: 22520 - protein, 388 aa, unidentified
KKCVKQATAQNGSVSKRANEIGVIKRHLPGCEKNVLCIGIKNKEAKFSNRTRPEGWLTPTANQLLQTHVNLVKKIQKFLPISDVVLEVNKFAFMRLDNPNVQKWQYQQGPLYQKASLEEAVSEMQEHHCLFCKNTIDHYHHVVPQHKNGSNTIGNIVGLCAKHHDLVHKDTSWQEKLAKKKTGLNKRYGALSVLNQIIPALTKELSSLFPKHFFATNGKSTYDYRAAHGVSKDHWLDAYCIAGSVLPNDACDNNINNRVPYELKQFRRHDRRALHKENMSRVYTLNGKSVATNRHKAIKQTTDSLEEFRQRQPNDVCKLKVKEHHPEYRNPKRNFPGCVFLVGKHTHVMQGTSGSHNGKADGYYDTNGNSYSSGKCKFVVKNEGIVFT

SEQ ID NO: 22521 - protein, 465 aa, unidentified
MSTCVCVLGNNGERLMPTIRLGKVRHLLKDGKAKIVKHHPFTIQLLYDSETNVQPIEICEDVGYNYIGISVKSESHEYVSAQYDTLQDEKEHHDDCRMHRRTRRNRLRYRKRRFDNRKRDKGWLAPSLGHKKQLNISLIEQYVSVIPITHATVEVGSFDTMLLQAIQKGEAKPEGVDYQKGPRYNLATLREEVFYRDDYTCQVCGRKITDGAILHMHHMFYWKGRHGNSLSELITVCEKCHTPANHQKGGKLYGFGEDIKFANLSGAAFMNTVRWQIVNVLYAAFGKPFVTFTYGAMTKEKRIALHLEKSHNNDAYAMGSFHPVNRCAFEHYEKVKRNNRILEKFYDSQYIDTRTGELTNGKSLFNGRISRSHKKDSENLHKYRGKRICKGHRALRRKKVALNPGDLVSLNGEILVVYGTHTKKNGSVNVEFKTPSRDGKKSASLKKLKIVKTSNLMHSAWTKVS

SEQ ID NO: 22522 - protein, 429 aa, Allochromatium sp.
MNRVFVLTNNRQPLMPCHPARARTLLRTRKAAVYRMQPFTIILLERAEGDTQPVEVKLDPGSKTTGIALVADFPRGRTVIWAANLHHRGQAIRSALTDRRAFRRGRRARKTRYRAPRFLNRTRPAGWLPPSLRARVENVRHLTAKLQARAPMASAAVETVRFDTQALQNPEISGVEYQQGELAGYEVREYLLEKWNRTCAYCGARDVPLEVEHIVPRSRGGSDRVSNLTLACRPCNERKGSQPIEEFLKGKPEVLRRIQAQARTPLKDAAAVNATRYAIGEAVKSVGLPTTFWSGGRTKRNRVSQGYAKDHWIDAACVGESGAAVRIPEGMVALEIKAMGRGRRRVHGNDRYGFPKGAPRSAKRVHGFQTGDLAKLTCTTGKSAGVHVGRIASIRARGWFVLAKHDRPAREFRLLQRADGYDYMTATNS

SEQ ID NO: 22523 - protein, 430 aa, unidentified
MPKVYVLNRHGRPLMPCTPAKARHLLDAGKAKVRHRTPFTIQLLYGSTGYTQEVILGVDAGSKTIGLSAATETEELFSAEVKPRNDVVELMSARRQFRRARRNRTTRYRKPRFDNRVRSKHKGWLAPSVEVKIQEHMTAIRRACAILPVSKVVVETAEFDLQLLKAVAEGKPVPQGEDYQKGEMYGHYNVRQYVLWRDSYTCCICGVHGSVRKGVPLHVHHLESRRVGGDAPDNLVTLCTACHDKLHKGIIMVADIKKRKRRSTRDATFMGIMRMTLLRRLWEQLPVPVVETRGYITKATREKLLVLPKSHTNDALAIAHGPQGFRAEHLPNIRQADRLYTIRPVRHHNRQLHKATILKGGVRKANQAEKYICGFRLYDKVLYNGIECFVWGRRTSGSFLLRQLNGEKVKDGVSYKHLKLLERSQSYLVA

SEQ ID NO: 22524 - protein, 279 aa, unidentified
VVVETAEFDLQLLKAIADGKPVPQGEDYQKGEMYGHYNVRQYVLWRDGYTCKCCGAHTTKKKEVRLHVHHLESRKVGGDAPDNQVTLCESCHEKLHKGLIAEKDFKKRKRKSTRDATFMGIMRKTLMQRLCSELPIPVVKTRGYITKATREKLLVLPKSHTNDALAIAQGKRGFNVGYLPEIAQIDKIYTIRPVRHHNRQLHKATILKGGIRKSNQTEKYVFGYRLFDKVQFNGQDCFIWGRRTTGIFTIKTINGKMIKDGISFKKLKPVEKSTGYLIA

SEQ ID NO: 22525 - protein, 471 aa, Streptomyces sp.; identical to SEQ ID NO: 14708

SEQ ID NO: 22526 - protein, 453 aa, unidentified
MTYVYVLSRSGRPLMPTARCGHVRILLKEKKARVVCGRPFTVQLLYDTDEAEPYLYGGTDPGRTNIGNAVVTEDGECVYRDKVETRNDEVAKGMSDRKKNRQARRRGERLVRKRRAKRCGTLSTKLGSGRLIPGTKKPTLVKDIINQEARFRNRKKRQLITPSVKQLVDTHLNHVDQIRKILPVKGWCLEANRFAFMKLEDGSVRGIDFQNGRLKGYASVDDFVYERQKGKCFCCGAPIEHYHHVKEQNDNGFDGPENKVGLCNSCHTKIHIGELELDVEGFGKKYQALSVLNQAIPYIYLGLVERFDEENVFICAGYDTKEIREAAGLDKDHDIDALCIASMATGVIPKQPEEQAFSVKQYRRHDRAKINNQPERTYKLDGKTVARNRKPRIDQKGLALSQWYEKQVRLCGRKEADRMLSRLKVRKSYRRYNNLYRVMPGAIVRHDGRIEVM

SEQ ID NO: 22527 - protein, 414 aa, unidentified; identical to SEQ ID NO: 8876

SEQ ID NO: 22528 - protein, 442 aa, Sutterella sp.; identical to SEQ ID NO: 3791

SEQ ID NO: 22529 - protein, 371 aa, unidentified
VDAGSKFIGLSASTDKAELYASEVELRTDVVDLLSSRRELRRARRNRKTRYRAPRFNNRVHSKNKGWLAPSVENKINAHLSRVDAVRQLLPVTKIVVETASFDIQKIKNPDIEGADYQWGEQLGFWNVREYVLFRDGHRCCHCHGKSKAPILNVHHLESRKTGGDAPNNLITLCETCHKAYHAGKIVLKAKRGQAFRDAAFMGIMRWTFFNRLKAQCPELDVRNTYGYLTKNTRIRHGLDKSHHTDAFCIAGNLGAKRLGEYFFQKQTRKHNRQIHKMSILKGGVRKRQQAPYEVKGFRLFDKVRYGSREAFIFGRRNSGYFDIRLLKGEKVSPAISYKYLQLLESRKTFLTQLIKKDAIPPATEVAGFLA

SEQ ID NO: 22530 - protein, 490 aa, unidentified
MAVFVLDRSGKPLMPCSEKRARKLLAAGRARVHRVMPFVIRLVDRRVQDSALQPLRVKIDPGSKTTGLALVREAESIDAASGEVRRELFVLNLFELVHRGRQISEALTGRRAFRRRRRGANLRYRAPRFLNREKGRGWLAPSLRHRIETTLAWVRRLQRWAPVIALSQELVRFDMQKMENAEIAGVGYQQGTLAGYELREYLLEKFNRTCCYCDAKDVPLNIEHIHPKAQGGTNRVSNLAIACIPCNTKKGARSIETFLAKDPARLARIRAQLKRPLKDAAAVNATRWALFEALKATGLPVETGSGGLTKFNRTRFTLPKGHALDAACVGQVNAIHAWSRPTLQIKCTGRGSYQRTRLTQYGFARGYLMRTKSVKGFRTGDLVRASVTAGKKLGEYIGRVAVRATGSFNIQAVDAVVQGISHKYCRIVQRGDGYGYAWSKTPSNTGKNNFPASSRLLERGRCRVHQPGGRLRLNVATQQASQGGGIHRSI

SEQ ID NO: 22531 - protein, 413 aa, unidentified
MTNYAFVLDANNKQLTPTKEQKAWFLIRKKRATLVSKYPMVIQLKKKIPDKEICKDEVRCGIDDGGLHVGVALVQKCQTRNKVVFKGVIEQRNDVKHLIDVRCGYRRYHRYHKRYRSARFNNRNSSKREERIAPSILQKRQATIRVINQLNKWINITNYWLEDVAIDIRALTDGYKPYRWQYQKSNRLDENIRKAVILRDGCKCMECGKSNCRLEVHHIKPRRLKGSSTLDNLITLCTKCHQKTESVEELYMDRYFALLNSSDNKNLNYAQHVMIGKKWLREQLSNLGMLYLTNGGDTANKRIDWDIAKSHSNDAICITDLRPDTCEIKEWAIKPMRRQSKAKTDNVLGIKHRDLVEYTFRNGETHRGYVTALYPEQNAINFQSPTKHCKKVNAKKCKGLWKYSKIYWLDNVG

SEQ ID NO: 22532 - protein, 418 aa, unidentified
GKPLMPTTRLGKVYRLLKTKKAHIVSYEPFTIQLDYQPDTHVIQPMTLGVDSGAIHSGYSVANEHREYYNAEVIARNDISNRLSDRRMYRRNRRYRKTRYRQPRFNNRKNKKKGWLPPSLEQKVAVQVNEINHIHRYFPIETIIVETAEFDIQKIKNPDISGIEYQQGTLQGYNIRNYLLEKHGRKCFYCGKTVSGFEVEHMLPKSKGGSNCIDNLTLSCHECNEKKGTLTAEEFIQQTLPVKKATAKLKQLPNEKRLFKYMAHMNTTRWTLYDAIKERYPNVKMTYGYITKYNRIQAGLPKAHHIDAKCITGFATVPSMSQTVVKVKMRRHNRQLHRATFSKGHVRKAACLPTTVFGFQLYDLVCFNNHRYYIKGRRSSGAFALVSVEGLKNEERMYKKLTLLAHTNAYLTNQYVNA

SEQ ID NO: 22533 - protein, 441 aa, unidentified
MSVSVFVQDRKHRPLMPCRPARARRLLKSGRARVVKRFPFTIRLVDRFLEDSSVQPVLVKIDPGSRHSGFVVVRADEQGHHHGLFFIDIVHRGESIRDALTARRNCRRRRRGNLRHRAPRFLNRTKPQGWLPPSLQHRVDTVTSWVSKLTGLVPVTGLVEELVKFDAQKLQNPEISGTEYQQGTLFEYEVREYLLEKFGRRCVYCGAENVPLNIDHVVPKARGGSNRISNLVLACVDCNEKKGSQPVEVFLKNRPEVLDRIKRRLKTSLAHAATVNATRWSLFNALKAFGLPVETGSGALTKFNRHTFGVPKEHWLDALCAGRVNGVHYPEGMGILQVRCTGRGNYQRTRVDKYGFPRGYLTRQKRVHGFATGDMVEVVVPSGKKAGTYRGRVAVRKSGYFNIQTPEGVIQGIGWRHCRLLSFNDGYGYAWLRPAPHSSPV

SEQ ID NO: 22534 - protein, 414 aa, unidentified
MPCSPAKARLLLKEKKAIVKRRTPFTIQLTIATGEAKQPVSLGIDAGYKHVGLSASTEKAELYASEVELRQDITDLLSARRALRQSRRNRKTRYRAPRFDNRIRTKRKGWLAPSVENRINAHLSRIEAVLRLLPVTKITVETASFDMQLLKNPDISGKEYQEGEQLGFWNIREYVLCRDGHVCQHCYGRSKDPVLNVHHLESRRTGGDSPGNLITLCEMCHKALHRGEITLKAKRGQSFRAEAFMGIMRWEVLNRLKASHPELEVNNTYGYRTKHARIANDIAKSHCADAFCIAGNLGAERLGEFFFQKQTRRNNRQIHKLSILKGGIRKRNQAPFEVNGFRLFDKVACKGEEGFIFGRRSSGFFDVRKLDGTRISAGISYKKLHLLEKRRTYLTEIRKEEVLPPLPEGRGLRA

SEQ ID NO: 22535 - protein, 456 aa, Halomonas sp.; identical to SEQ ID NO: 16180

SEQ ID NO: 22536 - protein, 423 aa, unidentified; identical to SEQ ID NO: 7434
  source 1..423: note = Cyanobacteria bacterium UBA11148

SEQ ID NO: 22537 - protein, 429 aa, unidentified
LLTFRKAHGIMYVYVLNKHGEPLMPCSAHKARVLLKNKKACVVKRTPFTVKLLYGSAGYKQPITLGVDAGSKHAGLSASTETHELYREQFTPRNDVVDLLSTRREFRRARRNRKTRYRAPRFNNRVHSKHKGWLAPSVEVKIQEHITVIKHVCQIMPILLVRVETAEFDTQRLKAMLEGKPLPVGTDYQLGEMYDEYNVRQYVLKRDNYTCQCCGAHATKTKQVKLHVHHLESRKTGGNAPSNLITLCPTCHKAIHEGKKTLGTKKRGKPLRDAVFMGIMRKTLLARLHKELSIPVQQTYGYITKMLREKNNLPKSHMNDALCIAKHPKAAPCENCYRSKAVRHHNRQIHKATILKGGIRKNNQAPYIVKGFRLWDKVRYDGQECFISGRRATGYFALRKLDGAIVTNSASYKKLRLLETAKNYLRERM

SEQ ID NO: 22538 - protein, 433 aa, unidentified
AKIVKHHPFTIQLLYDSKTNTQPIEICEDVGYNYIGISVKSKSHEYVSAQYDTLQDEKEHHDDCRKYRRTRRNRLRYRKPRFDNRKRSEGWLAPSLEHKKQLNIRLIERYVSVIPITRATVEVGSFDTMLLQAIQKGESKPEGVDYQKGPRYNLATLREAVFYRDNYVCKVCGRKATEGAILHMHHMFYWKGRHGNSLDELLTVCEKCHTPANHQKSGKLYGFGENVKFADLSGAAFMNTVRWQIVNELYAAFGKDFVTVTYGAMTKEKRIALHLEKSHNNDAYAMGEFHPNCRCTFEHYEKVRRNNRILEKFYDSRYIDIRTGEIATGKELFNGRINRNHKKDSENLHKYRGKRLYKGHRALVRKKVNFNPGDLVSLNGEVLVVHGTHTNKKGAVNVEFKTPAKNGRKSANLKKLKIVKAAGSIHPAWEKVS

SEQ ID NO: 22539 - protein, 351 aa, unidentified
ASEVELRQDVSDLLSARRTLRQSRRNRKTRYRAPRFDNRIRTKRKGWLAPSVENRINAHLSRIGAILRLLPVTKITVETASFDTQLLKNPDISGKEYQEGEQLGFWNVREYVLFRDGHACQHCHGRSKDPVLNVHHLESRRTGGDSPGNLLTLCETCHKALHRREIKLKTKRGQSFRAEAFMGIMRWEVLNRLKASHPELEVHNTYGYRTKHTRIVNGIDKSHCADAFCIAGNLGAKRLGEFFFQKQTRRNNRQIHKLSILKHGLRKRNQAPFEVKGFRLFDKVVCQGEEGFIFGRRSSGSFDVRKLDGTRISAGISYKKLRLLEKRRTYLKEIRKEEALPPLPEGRSLRA

SEQ ID NO: 22540 - protein, 429 aa, Streptomyces sp.; identical to SEQ ID NO: 16882

SEQ ID NO: 22541 - protein, 454 aa, unidentified; identical to SEQ ID NO: 5322

SEQ ID NO: 22542 - protein, 450 aa, unidentified; identical to SEQ ID NO: 2935

SEQ ID NO: 22543 - protein, 428 aa, Oscillochloris sp.
MVFVLATDRTPLDPTTLHRADQLLNRGRASVFRKYPFTIILHDRTAAESITHPHRVKLDPGSKTTGIAVVAEATGQVVFGAELTHRGQAIRDALRSRRASRRSRRQRTTRYRQPRFLNRRRPAGWLAPSLQHRVDTTLTWITRLRRSIPLTTISMELVRFDTQLMENAEISGVAYQQGTLAGYEVREYLLEKWGRRCVYCGASNTPLQVEHIVPRARGGSDRVANLTLACEPCNTRKGTQTAIEFGHPDVQAQARRPLKDATAVNTTRWAMYQRLVATGLPVEVGTGGRTKYNRTRLGLAKAHWHDAACVGASTPEYLDTRWVRPLLITATGHRSRQMCRMDRYGFPRTGPKGTRVVKGFKTGDMVRAVVTTSTKQGVYRGRVAVRASGWFNITTSTRTIQGIHARFCRHLHRADGYTYPEGVASSHP

SEQ ID NO: 22544 - protein, 517 aa, unidentified
MTALEERLSKTEYIYVLGFDGKPQMPTRRKRHVLKLLKTGRARIAEDIPFTIRLTYRNAPVLQPVTLAEDPGRTNIGAAVLSPLGGLLFSAVIETRNKEIKKLMADRKKSRQASRRGERKARQRLAKRYGSMVKSGMVMRKLPMYAADKFVTCKFIRNTQARFCNRKRCPDWITPTVQHLVQTHLNIIRKISKYLPVTDIAFEVSRFAFMHMENPKAMGVDFQNGPLKGYDDVKEAIRTQQHGKCLMCKKPIAHFHHIVPRSRGGSDTIQNLAGLCPECHTKVHTDTAFRKDFDRKKSGQLKKYGALSALNQAVPFICKKLLEEYGEEHVHFCRGLDTSLIRTALGFEKTKKNQMHEVDACCIGLAALEINEVETPAFDHTFQIRQFRRQDRSIIHHQTGRSYYQGKEKVAQNRKPGFEQKTTALSQWYEEQVRIHGEKEAEKLRSQLRVEKSCRHYNDMDRFLPGAVFLYEGKRYVLSGRITNGKYLRACGQGMKNSLLQSVRSSGIMQDWFLFDI

SEQ ID NO: 22545 - protein, 465 aa, unidentified
MSTCVCVFSNNGERLMPTIRLGKVRHLLKDGKAKIIKHHPFTIQLLYDSKTNTQPIEICEDVGYNYIGISVKSESHEYVSAQYDTLQDEKKHHDDCRKYRRTRRNRLRYRKPRFDNRKRDDGWLAPSLEHKKELNVNVIKMYCEVMPITHAIVEVGSFDTMLVKAIEEGKATPESADYQKGPRYKLATLREAVFYRDNYTCQVCGRKANEGAILHVHHMFYWKGRHGNSLSELITVCEKCHTPANHQKGGKLYGFGEDIKFANLSGAAFMNTVRWQIVNVLNAAFGKPFVTFTYGAMTKEKRIALHLEKSHNNDAYAMGSFHPVNRCAFEHYEKVKRNNRILEKFYDSQYIDIRTGEIATGKELFNGRISRSHKKDSENLHKYRGKRICKGHRALRRKKVALNPGDLVSLNGEILVVHGTHTKKNGSVNVEFKTPSRGGKKSASLKKLKIVKTSNLMHSAWTKVA

SEQ ID NO: 22546 - protein, 458 aa, Scytonema sp.; identical to SEQ ID NO: 6085

SEQ ID NO: 22547 - protein, 431 aa, unidentified
MPNKVYVINKHGRPLMPCSPAKARHLLDEGKAKVKKRTPFTIQLVYGSSGYTQEVILGVDAGSKTIGMSASTTKEELLSAEVKPRNDVVDLLSTRREFRRARRNRKTRYRKPRFDNRVRSKHKGWLAPSVEVKIQEHITSIKRVCRILPVSKVVIETAEFDLQLLKAIADGKPVPQGEDYQKGEMYGHYNVRQYVLWRDDYTCQCCGAHATKKKEVRLHVHHLESRKVGGDAPDNQVTLCESCHEKLHKGLIAEKDFKKRKRRSTRDATFMGIMRKTLMQRLCSELPIPVVKTRGYITKATREKLLVLPKSHTNDALAIAQGKRGFNVGYLPEIAQIDKIYTIRPVGHHNRQLHKATILKGGIRKSNQTEKYVFGYRLFDKVQFNGQDCFIFGRRTSGYFVVKTIDGKVIHNSASFKKLKLVERASNYLIA

SEQ ID NO: 22548 - protein, 431 aa, unidentified; identical to SEQ ID NO: 2933

SEQ ID NO: 22549 - protein, 408 aa, unidentified
MVYVQDIDGKPMMPTTRHGKVRRLLKANKATVVNLCPFTIRLTYATSGYKQEIVLGVDAGTKHVGLSATTKSKELYSSEVILRSDIVELLSTRRELRRTRRNRLRYRKPRFGNRVKSKHHGWVTPSVRHKVDAHIRVIDNICSTLPISRIIVEIAQFDTQKIKNPDISGNEYQEGDQLGFWNVREYVLARDGHKCQHCKGKSKDPILNVHHIESRKTGGDSPSNLITLCETCHKEYHKGNIDLKVKRGKSLRDAAVMGIMKWKLYEELKSRYPNVSMTFGDITKYNRIKYGIEKYHISDAFVISKNFNALRLEYHYKVRLVRRHNRQIHKQKVLKGGAKKPNQSPFEVFGFRLFDRVMFEGNYYFIFGRRKSGSFNIRDINGGNQRNVTYKKLKLSIGKRFMIQKEMN

SEQ ID NO: 22550 - protein, 462 aa, unidentified; identical to SEQ ID NO: 10670

SEQ ID NO: 22551 - protein, 461 aa, unidentified
MNKVFVIDTKFQPLAPCHPAKARRLLRAGQAAVHRTYPFTIVLLRTVEEPVAPPLRVKIDPGSHVTGIAIVHDATGEIVWAAELDHRGQMIVASLLTRRGGRRGRRSRKTRYRQARFLNRRRQAGWLPPSLASRVANVVTWVRRLRRVCPIQALSMELVRFDTQALQNPEISGVEYQQGTLAGIETKEYLLAKWGRQCAYCDAQGVPLEVEHIVARDQGGSHRLSNLTLACVPCNQKKSNRHVREFLTHDPSRLAHILSQAKAPLKDAAAVNSTRWALYEALQATGLPVEVGSGGRTKWNRTTRGLPKTHWLDAACVGANTPETLWTSERLHPLTIRATGHGSRQMCTMDKYGFPRTRAKQAKHVHGFQTGDIVKAVVPSGKHQGVYVGRVAVRATGSFNIRTASALVQGISHRYCRLLHRVDGYAYQSKVEAHADTGRAFSAPRPSSQGSSSWASGRYSL

SEQ ID NO: 22552 - protein, 262 aa, unidentified
LTHQFKKRVPVMVYVLDKNGQPLMPTDRHRKVRLMLQSGQAKVIKRCPFTIQLNYDSGHQTQEISLGIDAGSKHIGVSATTKIKVLYEVDVELRNDIVDLLSSRRELRRGRRNRKTRYRPARFDNRRREDGWLAPSIRQKIGTHLTVVENICKILPISRITVETASFDIQKIKNPDIQGAEYQQGDQLGFWNNREYVLFRDNHTCQCCKGKSKDKILNVHHIESRKTGGNAPNNLITLCEICHTGYHKGAIQLPKTVKRGMR

SEQ ID NO: 22553 - protein, 406 aa, unidentified
MVYVQDIYGRPLMPTTRHGKVRRLLKSKKATVVNLCPFTIRLLYDTTGYKQEITLGVDTGTKHVGLSATTKSKELYASEVILRSDVVDLLSTRRELRKIRRYRLRYRKPRFMNRIKSKKRGWIAPSIRQKIDSHIRIIGFVYSILPVSKLIIEVAQFDTQKIKNPEISGKEYQEGEQLGFWNVREYVLAMDEHKCQHCKGKSKDPVLNVHHIESRKTGGDSPSNLITLCKTCHKEFHKGNIKLKVNRGESLRDAAVMSIMKWELYDELKSLYPNVKMTFGYITKYNRINHGIEKSHVSDAFVISRNFDSERLGYYYKRKLVRRHNRQIHKMKAPKGGNKRMNQSPFKVFGFRLFDKVMFQGKERFIYARRLRGIFNIRDINGENKKDISYKKLEYVSHGLISIVAG

SEQ ID NO: 22554 - protein, 425 aa, Moorena sp.; identical to SEQ ID NO: 3008

SEQ ID NO: 22555 - protein, 424 aa, unidentified
MSNHVLVLDTNYKPLTPCKSSTARRLLNVGKAAVFRRHPFTIILKKEVNEVGQPCQIKIDSGSKTTGIALLKGNQLVWGAELTHRGQQIKNALESRRSIRRNRRNRKTRYRQPRFLNRTRATGWLAPSLEHRVLTTMTWVKRIMRFCAVDAVAQELVRFDTQKMQNFEISGKEYQQGTLYQYETREYLLEKFNRTCVYCGAKNVPLEVEHIRPKSKGGSNRISNLTITCVPCNQAKSNLSIEEFLSDKPSLKERILRKVKAPLKDAAAVNSTRWALWRSLNALGIKLTTGTGGQTKYNRCRLGLPKTHWLDAACVGVVEALEVLTNQPLLIKATGHGKRQMCGTDKYGFPKRHCSNKVVHFGFKTGDIVRADVPKGKNQGVHVGRVTIRAKGSFNLKTATGMVQGVNQKYCNIIHKKDGYSYAF

SEQ ID NO: 22556 - protein, 432 aa, Moorena sp.
MFVFVLNSSRKPLNPTHPARARKLLKTGKAAVFKRYPFTIILKEEVAEPNNQQLRIKIDPGAKTTGIAILRNESVLWGAELTHRGDQIRSALTSRRQLRRSRRNRKTRYRQPRFNNRCRQEGWLPPSLISRVENILTWVKRLWRLSPIAHISTELVRFDTQLIQNPEISGIEYQQGTLAGYELREYMLEKWHRRCVYCGATDTKLEIEHIVAKSKGGSNRLSNLTLSCRKCNQKKGNKPIEQFLENNPLLLKSILSQAKRSLADTAAVNATRSRSVANGEWKLFNGLKELGIPVETGTGGRTKYNRCRQNLPKTHWLDAANVGYSTPDTLKILVSRPMRIKATGHGNRQMCGTNAFGFPIRHRSNTKKHFGFQTGDIVKAVVTKGKKVGSYIGRVLCRATGSFDITTATGRVAGISHKYCSFVHRSDGYSYQ

SEQ ID NO: 22557 - protein, 394 aa, unidentified; identical to SEQ ID NO: 10869

SEQ ID NO: 22558 - protein, 507 aa, unidentified
VLNKDGKPLMPTTRGGHVRHLLKEQKARVVRTKPFTIQLLYETDDVVQPLYLGIDPGRTNIGVAVVKTDGTAVFTAHLETRNKEIPKLMKKRKDSRRARRTNGRRCRRQRRAKANGTISKKCVKQDTAQNGSVSKRAKEIGVIKRHLPGCEKEILCIGIKNKEAKFNNRTRPEGWLTPTANQLLQTHVNLVKKIQKFLPISDVVLEINKFAFMQLDNPNIQKWQYQQGPLCQKANLEEAVSEMQEHHCLFCKNPIDHYHHVVPQHKNGSNTIDNIVGLCTKHHDLVHKETAWQEKLAKKKTGLNKKYGALSVLNQIIPALTKGLSSLFQKHFFVTTGKNTYDYRAAHSVSKDHWLDAYCIACSVLPNDVCDNSINSRVPYELKQFRRHDRRALNNENISRVYTLNDRKVAINRHKAVEQTADSLEEFRQNHPDDVCKLKVKEHHSTYRNMNRNYPGSVFLVGKQVHIMQGIAGSKDGKSTKYNDTNATTIAAGKCKFVAKNSGILFV

SEQ ID NO: 22559 - protein, 425 aa, unidentified; identical to SEQ ID NO: 9663

SEQ ID NO: 22560 - protein, 439 aa, Ktedonobacter sp.
VSFVFLVDTNRQPLSPVHPGRARLLLKAGKAAVLKRYPFTLILKAAIEQPQVQPLRLKLDPGSRISGIAIVDNASGQVLFAAELAHRSQQIKKALDDRRAVRRRRRARHTRYRKPKFQNRSRPPGWLVPSLQSRVCNIATWVKRLRKLCPVTAISMELVRFDLHLMQNPEISGIQYQQGTLAGYECREYLLAKWGRACSYCGKQNVPLEIEHIVARANGGTDRISNLCLACAPCNKRKGTQDIAVFLAKKPDLLKQIQAQAKTPLKDATAVNSTRWALFELLQELGLPIECGSGGMTKYNRELRNLPKTHWVDAACVGASTPLVLQVKQIKPLAITANGHGSRQMCLMNEFGFPRTKPKAKHFSHPFHTGDIVKAVVPAHLKNSGAHTGRVSVKAKGAFTISTNKGKVTDIGKKYCQVLQKADGYAYSQKGEAAFPPVP

SEQ ID NO: 22561 - protein, 429 aa, Parasutterella sp.; identical to SEQ ID NO: 7275

SEQ ID NO: 22562 - protein, 451 aa, unidentified; identical to SEQ ID NO: 7526

SEQ ID NO: 22563 - protein, 420 aa, unidentified; identical to SEQ ID NO: 3288

SEQ ID NO: 22564 - protein, 506 aa, unidentified
MPYIYVLGMDGKPQMPTTRRRHVQRLLDTGRARIVSHVPFTIQLLYKNDPVLQPVTLAEDPGRINIGLAAFSLKGDLLFSAKVETRNKEIAKLMDKRRQSRRASRNGERKARQRLARKFGTMLKAGMLMRKLPQYAADKFITCHVIRNTQARFSNRKRPDGWLTPSARHLVQTHINLVRKMGRYLPVTDVALEVNRFAFMQMEDPSISGVDFQNGPLKGFDDLHAAVRDLQDGKCLLCKKEIEHFHHIVPRSRHGSNTIGNIAGLCTKCHEKVHKDEKAGKRLKDKKKGLDKKYGALSVLNQAIPFICKELETEFGKEHVHYCTGRETSLVRRSLGYHKTKEEQYHEVDAWCIGALFLDSIPEKAPAFEEVHTIMQFRRQDRALIKAQTSRSYKLDGETVAWNRKKRTDQKNDSLEDWYQKQVQLHGQKEAGRMRSRLTVKISQRRYNNPERMLPGAVFLYKGKRYVMKGQHCNGVYLQAVGMGSRDFPVKECTIIKRNQGLVFLS

SEQ ID NO: 22565 - protein, 456 aa, unidentified
MAVFVLDKKKQPLMPCSEKRARLLLARGRAVVHKRYPFTIRLKNRVGGEAQPLRLGIDPGSKTTGLALMREPDSQQRHVLCLFELIHRGFQIKKALQQRAAFRRRRRSANLRYRAPRFNNRIKPKGWLAPSLQHRVDTVMAWVNRLSKSAPITGISQELVRFDTQKLESPEISGVEYQQGTLLGYEVREYLLEKWGRECAYCGTADTPLEIEHVVPRSRGGSNRVSNLTLSCHPCNAEKDSQTLTDFFATNKGLKKRLKANGLSADAQLERVQRQLKQPMRDASAVNATRWALFSALKTTDLPVAVSSGGRTKYNRQRLNIPKTHALDAACVGAFGKLYDWTVPTLTIKAMGRGSYQRTRLTKHGFPRGYLMRQKQVHGFQTGDMVRAIVPTGKKAGTHTGRVAIRKTGSFNIQAEYGAVQGISHKYCTLIQRSDGYGYYVTLFSNLTGEAGRAVA

SEQ ID NO: 22566 - protein, 413 aa, unidentified; identical to SEQ ID NO: 3220

SEQ ID NO: 22567 - protein, 512 aa, unidentified; identical to SEQ ID NO: 5651

SEQ ID NO: 22568 - protein, 464 aa, unidentified; identical to SEQ ID NO: 3972

SEQ ID NO: 22569 - protein, 425 aa, unidentified; identical to SEQ ID NO: 14294

SEQ ID NO: 22570 - protein, 420 aa, unidentified
MQNYVFVIDTNFQPLNPIPPKKARRLLDKGKAAVFRMYPFTIILKTSVMNPTISPCQLKIDPGSKVTGFALVQNNQVIWGMELEHRGGLIKKKLESRRAVRRGRRNRHTRYRKPRFLNRKRPEGWLPPSLEHRILTIQTWVKRLIKFCPIKEIWVERVKFDTQKMENPEIKGVQYQQGERRGYEVREYLLEKWGRECTYCGKQSVPLQIEHIHPKSLGGSNRVSNLCLACEKCNQRKGNKPIEEFLKKKPNLLQKIKNKAKQPLKDAAAVNATRNKLVKVLQSIKSVVTGTGAQTKYNRNKFGFPKEHWIDAACVGDIETLVLRTSQPLLVNCKGHGGRQKAALNKYGYPIRHNPLKPIKGWCSGDIAKNLLTGEFGRVNPRSKSNSFNYTIPGEKAISLHVKNLVRVHKKDGYTYGFCQ

SEQ ID NO: 22571 - protein, 375 aa, unidentified
VSLGVDAGYKHVGLSASTEKAELYASEVELRQDVSNLLSARRALRQSRRSRNTRYRAPRFDNRIRTKRKGWLAPTVENRINVHLSRIETVLRLLPVTKITVETASFDTQLLKNPDIAGKEYQEGEQLGFWNVREYVLFRDGHVCQHCHGRSKDPVLNVHHLESRRTGGDSPGNLITLCETCHKALHRGEIKLRAKRGQSFRAETFMGIMRWGVLNRLKASHPKLEVHNTYGYRTKHARIANGIAKSHCADAFCIAGNFGAKRLGEFFFQKQTRRNNRQIHKLSILKGGIRKRNQAPFEVKGFRLFDKVACQGEEGFIFGRRSTGYFDVRKLDGTCISAGISYKKLHLLEKRRTYLTEIRKEEALPPPPEGRGLRA

SEQ ID NO: 22572 - protein, 424 aa, Ruminococcus sp.; identical to SEQ ID NO: 2430

SEQ ID NO: 22573 - protein, 420 aa, unidentified
MQYVYVLNKHGEPLMPCSPRKARLLLKQKKACVIKRTPFTIKLLYGSTGYKQPVTLGVDAGSKHIGISATTEKYELYREEATPRNDVVDLLSARRAFRRSRRNRKTRYRAPRFDNRVHSKHEGWLAPSVEVKIREHITLIKRVCRILPITLVRVETAEFDTQRLKAMLEGKPLPVGTDYQLGEMYDEYNVRQYVLKRDNYTCQCCGAHPTKTKAVKLHVHHIETRRTGGNAPNNLITLCTVCHKALHAEKVTLDGKKRGKPLKDAAFMGIMRKTLMERLRKELKIPVQGTYGYITKYLREKNGILKSHTNDARCISKNPLAIPCDTCYYTKAVRHHNRQLHKATILKGGIRKANQAPYIVKGYRLWDKVAYNGTECFITGRRTSGYFALKKLDGTVVSNSISYKKLRLLEVATNYITERK

SEQ ID NO: 22574 - protein, 231 aa, unidentified
YTCQCCGAHATKKKEVRLHVHHLESRKTGGDAPRNLITLCDSCHKKHHDGLITEDDFKKRKRRSTRDATFMGIMRKTLIQRLRAELTIPVAETRGYITKATREKLLVLPKSHTNDALAIAQGKHGFNVGYLPGILQIDKIYTIRPVRHHNRQLHKATILKGGIRKSNQAEKYVFGYRLFDKVQFNGQDCFIWGRRTSGYFVVKTIDGKVIHNSASFKKLRLVERASNYLIA

SEQ ID NO: 22575 - protein, 289 aa, Parasutterella sp.; identical to SEQ ID NO: 15206

SEQ ID NO: 22576 - protein, 415 aa, unidentified
MVYVVANDGQPLMPTERHGKVCRMLKSGMAKVVKKCPFTIQLQYESERNVQPVSLGVDAGSKHIGISATTKTKVLYESDVELRDDIVKLLATRRQLRRSRRSRKTRYRPVRFDNRKRKEGWLAPSIRQKIGSHLTVVANACKILPINQIIVETASFDIQKIKDPEIQGIEYQQGEQMDFWNIREYVLFRDGHICQCCKGRFKDKILNVHHIESRKTGGNAPNNLITLCETCHKGYHNGTVILPKNIKHGMQFKDAAFMGIMRWTFYNTLKEQYEPDIPVSMTYGYLTKNTRIEHGLPKEHYIDARCISGNPDAVSDGTYYYQKKVRCHNRQIHKQTILKGGIRKSNQAEYLVKGYRLFDKVRYQGREYFIFGRRKSGFFDIRTLSGEKVNKGSINVKRLTFVDTRKNYLTERRTV

SEQ ID NO: 22577 - protein, 427 aa, unidentified
MNRVFVLTNTKQPLMPCRPARARKLLKKGRAAVYRFAPFTILLKDRAAGDVQPLEVKVDPGSKTTGLSLVALFERGREVIWAANLYHRGQAIRAALADRRSFRRGRRARHTRYRAPRFLNRTRPEGWLPPSLRSRVENICALVAKLQVRAPITGAAIETVRFDTQLMQNPGISGVDYQQGTLAGYEVREYVLHKWNRTCAYCGVKDVPLEIEHIVPRSRGGSNRPSNLTLACRPCNGKKGNQPVEVFLASSPDRLKRIKAQARAVLKDAAAINATRYAIGAAIKGLGLPTTFWSGGRTKMNRIAQGYAKDHWIDAACVGETGAAVRIPPAMQALEIKAMGRGRRRVMGNDKYGFPKGTPRTHKRVQGFQTGDLARITCTKGKSAGTHIGRIASIRARGWFVLNKHDRPAREFQLLQRADGYAYGAAA

SEQ ID NO: 22578 - protein, 420 aa, unidentified; identical to SEQ ID NO: 7360

SEQ ID NO: 22579 - protein, 413 aa, unidentified
MTNYAFVLDADGKQLAPTKEQKAWFLIRKKRAILVSKYPMVIQLKKEIPDKEICKNEIRCGIDDGGLHIGVALVQKCQIRNKVIFKGVIEQRNDVKHLMDVRRGYRRYHRYHKRYRPARFNNRKSSKREGRIAPSILQKRQATIRIINQLNKWINITNYWLEDVAIDIRALTDGYKPYRWQYQKSNRLDENIRKAVILRDGCKCMECGKSNCRLEVHHIKPRRLKGSSTLDNLITLCTKCHQKTEGVEELYMDRYFALLNSSDNKNLNYAQHVMIGKKWLREQLSNLGILYLTNGGDTANKRIDRDIAKSHSNDAICITDLRPDTCEIKELTIKPMRRQSKAKTDSVLGIKHRDLVEYTFRNGETHRGYVTALYPEQNALNFQSPTKHCKKVNASKCRLLWKYSKIYWLDNVS

SEQ ID NO: 22580 - protein, 547 aa, unidentified
MFLVLDSAEPAPSLRKHFICCAQAYHRCRDTVISAILHSYKKGKNMSEYIYVLGMDGRPQMPTRRKRHIDRLLSTGKAKVVEYVPFTVQLLYENHPVLQPVILAEDPGRTNIGVAAVSQKGELLFSAVVETRNKEITKFMEKRRKARQRLAKRCHTMIKAGQVMRKLPMFGEEKYITCRYIRNTESRFCNRRRKDGWLTPSAEQLVRTHINLVHRIQGFLPVTDVALEVNRFAFMQLEDPYITGVDFQNGPLKGYDDRKAAVYDQQDGQCLLCNKKPIEHYHHIVPVAKRGSDTLANIAGLCCRCHEKVHKDAGAARRLQNKKQGLTKKYGALSVLNQAIPFICKRLEEEFGEHVHYCSGRDTSRLRQSFGFHKTKDEPLHEVDAWCIGVLSLREIPEKCPDFTKVYQIKQFRRQNRRRINHQTERRYYLDGKLVAVNRKKRMGQTGRKDNQTKDSLADWFTKMVHLYREKEAEHLRSRLTVKKSQHSYNDLKREMPGAEFIYENQRYILSGQLTNGKYYRAVGSTQNFPAAKCRIRRHNRGLVFVS

SEQ ID NO: 22581 - protein, 463 aa, unidentified
LPGKYKYKGGQLMSVAVINKTGERLMPTSEHRARKLLKSGKAIKHNYHPFTIQLTERESGDVQPIELCMDTGYIHVGTSVKSEKHEYLAEQIDTLTDEKARHDACRMYRRQRRSRKRYRHPRFNNRKRNDRWIAPSLEHKKSIHIQAILRICKVMPVTDITLEMGNFDTQVLKAREEGKPLPHGADYQHGERYGIATLREAVFTRDDYKCQCCGMTIKDGAILHVHHIKYRSQGGTNRMSNLITVCDKCHTPANHKQGGKLYNWKPKIASFKGATYMTTIRWKLYNEVKALFPDIDIHITYGAETKERRRALDIDKSHVNDAFVMGQFHPKHRSKPICYKKKRRNNRCLEKFYDAKYIDSRDGKKRSGQELFNGRISRNHKKDSENLHQYRLQKVTPGRRAIRRQHYPIQPHDIIVYNGNKIEVSGCQHKGTRVVFSKTKKSVQISKIKLFKYAGGYSKSVFN

SEQ ID NO: 22582 - protein, 431 aa, Escherichia sp.; identical to SEQ ID NO: 3801

SEQ ID NO: 22583 - protein, 455 aa, unidentified; identical to SEQ ID NO: 8131

SEQ ID NO: 22584 - protein, 465 aa, unidentified
SIKPLINIGEGVIYSSICTGLSLQTYQKRKEVPYMVYVLDIDGQPLMPTTRHGKVRRLLNSHLAKVVKRCPFTIQLLYQSTKETQPVSLGVDAGSKHIGMAATTEKKVVYQEELSPRNDVVKLLSARRTLRRTRRNRKTRYRKPRFNNRAHSKHKGWLAPSVEVKIQEHITAIKRICQILPISEIHVETAEFDLQRLKAMDEGSPLPVGIDYQLGEQYDFYNTRQYVLHRDGYTCQCCGTHDNNIKLHVHHIESRQTGGDAPNNLIILCEHCHKALHEGKLELPKGKKRGKSYRDATFMGVMRKTLLERLKKEIDVPVEGTYGYITKYWRERAGLEKSHIHDAVCISKYPYAKPLDIYYLTKTVRHHNRQIHKSNFSKGGIRKRNQAPYLVKGFRLFDKVLYQGKEYFIFGRRATGYFDIRTLDGTKVNKGSISYKKLRIQDTAKAYLKEARAIPHMNKFTCVLA

SEQ ID NO: 22585 - protein, 211 aa, unidentified; identical to SEQ ID NO: 16182

SEQ ID NO: 22586 - protein, 409 aa, unidentified
MVYVQNIEGKPLMPTTRHGKVRRLLKTKQAVVVNLCPFTIRLTYISDSYKQEITLGVDAGTKHVGLSATTKSKELYASEVTLRSDMVDLLSTRRELRRTRRSRLRYRKPRFDNRIKSKREGWLAPSVQNKIDAHIRVIQNVYSILPITRLVIEVAQFDTQKIKNPDIEGKLYQEGEQLGFWNVREYVLYRDGHKCCHCKGKSKNKVLNVHHIESRKTGGDSPSNLITLCETCHDYYHKGKIDLKVRRGKSLRDAAVMGIMRWRLYDCLKGLYPNVFMTYGYVTKHNRIVHNINKSHTSDAFVISKNFEAERSNYLYRIKLIRRHNSRIHKSKILKGGKKKMNQSPFEVFGFRLFDKVLYNNKIMFIYGRRKTGSFNIRDIEGNNPKDVSYRKFKLYRGKRNPICIKENE

SEQ ID NO: 22587 - protein, 372 aa, unidentified
LSKVKTMRVFVFNMRGRPLMPCSQRKARLLLRENKAMIYKYHPFTIQLTYTTGETKQDCHIGIDTGSKYIGAAVRSEDKVFWKGEIELRQDIRSNLDTKRIYRRSRRNRKTRYRKPRFLNRKRRDEWLPPSLQSRINHTFHWIDTLSSLVSNPILHIEVGKFDVAKMINPEIHGVDYQHGQTYGFFDERYFVFARDNYTCQCCGKSKNKILNTHHIIYRSNGGTNRVDNLITVCTDCHTSQNHRKGGIFYQWQEQHKKVKQYKEPPFMNTLRKRIFVAYPDAEITYGSETTPKRKAMKLDKTHYNDAIVISGINEIKENPEEWLLIKQFRKKKRSLHEATARKGRKKPNRNQTRNSKNTPYYKGFYLNDKVS

SEQ ID NO: 22588 - protein, 472 aa, unidentified
MTALEEKLSKTEYIYVLGFDGKPQMPTRRKRHVLKLLKTGRARIAEDIPFTIRLTYRNAPVLQPVTLAEDPGRTNIGAAVLSPLGDLLFAAVIETRNKEIKKLMADRQKSRQASRRGERKARQRLAKRYGSMVKSGMVMRKLPMYAADKFVICKFIRNTQARFCNRKRCPDWITPTVQHLVQTHLNIIRKISRYLPVTDIAFEVNRFAFMHMENPEAMGVDFQNGPLKGYGDVKEAIRTQQHGKCLMCKKPITHFHHIVPRSRGGSDTIQNLAGLCTECHTKVHTDTAFRKDFDEKKSGQLKKYGALSALNQAVPFICKKLLEEYGEEHVYFCRGLDTSLIRTAFGFEKTKKNQMHEVDAYCIGLAALEVNEVETPAFDHTFQIRQFRRQDRSIIHHQTGRSYYQGKEKVAQNRKPGFEQKTTALSQWYKEQIRIHGEKEAEKLRSQLRVEKSCRHYNDMDRFLPGAVFLYE

SEQ ID NO: 22589 - protein, 413 aa, unidentified; identical to SEQ ID NO: 3587

SEQ ID NO: 22590 - protein, 542 aa, unidentified
MSRLTPDAEVPFFCETALQQKTKEASELTALEELLSKTEYIYVIGTDGRPQMPTKRKRHVLKLLNTGKARIAEKVPFTIQLKYDNIPVLQPIILAADPGRTNIGVTALSPFGDLMFAAVIETRNKEIKKLMADRKSHRQASRRGERKARQRLAKKYGTMIKAGMIMRKLPQYAADKFVTCNVIRNTEARFCNRKRCSDWLTPTVNHLAQTHLNVIKKISRYLPVTDIAIEVNRFAFMQMENPNASGVDFQNGPLRGFDDVKAAIREQQNGKCLMCKNDIEHFHHMVPLSKGGSDTIQNQVGLCPKCHAKAHTEQTFKKKLKDKKSGLLKKYGALSALNQSIPFICKDLLAEYGKEHVHFCTGKETSLIRTSLGYEKTKDNQMHEVDAYCIGLASLELEDIKLQSFVNTYKIKQFRRQDRSIIHHQTERSYYLDEQKIVTNRKPRFEQTGNALSDWYKKQVKACDKAKADKMLNTLKVKKSARSYNSEGRLMPGAVFSYNGQRHVMSGQLTGGRYLRAYGDTKTNYPASKCNISRSNEGLVFI

SEQ ID NO: 22591 - protein, 441 aa, unidentified
RRLLKDGKAKIIKHHPFTIQLLYDSKMNTQPIEICEDVGYNYIGISVKSQSHEYVSAQYDTLQDEKACHGSCRKLRRTRRNRLRYRKPRFDNRKRGEGWLAPSLRHKKELNVNVVKMYCAVMPITHATIEVGSFDTMLVKAIQEGKAIPEGADYQKGPRYNLATLREAVFYRDNYTCQVCGRKVADGAILHMHHMFYWKGRHGDSLNELLTVCEKCHTPANHQKGGKLYGFGENVKFADLSGAAFMNTVRWQIVNELYAAFGKDFVTVTYGAMTKEKRIALRLEKSHNNDAYAMGEFHPNCRCTFEHYEKVRRNNRILEKFYDSRYIDIRTGEIATGKELFNGRINRNHKKDSENLHRYRGKRTYAGHRALLRKKVNLNPGDLVSLNGEVLVVHSTHTNKKGAVNVEFKTPGKSGQKSASLKKLKIVKAADSMHSAWEKIS

SEQ ID NO: 22592 - protein, 441 aa, Anoxybacillus sp.
MVFVLDTNKRPLAPCHEAVARKLLKQGKAAIYRRFPFTIILKKSVDESEIKATYRLKIDYGSRHTGLAILRGQEVVWLGQLDHRTDIKERIDKRRAFRRARRNRKTRYRKPRFLNRKRKEGWLPSSLESRVQNIQTWVNRLKKLCPIGYISYENTKFDTQLMRNPEINGVEYQQGTLQGYEVREYLLEKFGRKCCYCGKENVPLEVEHIIPKSRGGTDRVDNLCLACHDCNQRKGSKTAEEFGYPHIQKQVKESLKDASAINSTRWKAYEVLKQTGLDVECGTGARTKMNRIRLDLPKTHYFDACCVGESTTNHLYFKTKEVLFIKAKGRGSRSRTNLDRYGFPRGYLARQKFFFGFQTGDMVKAVVPRGKYQGVWFGEVACRKTGSFDIKGKDGKRIAQGINYRYVQVIQRFDGYAYGKGGRNLRKVQFLPVPKGRGFLA

SEQ ID NO: 22593 - protein, 308 aa, unidentified
MPCSPAKARHLLDDGKAKVKKRTPFTIQLVYGCSGYTQEVILGVDAGSKTIGMSASTNKEELFAANVTPRNDVVDLLSTRREFRRSRRNRTTRYRQPRFNNRVRSKHKGWLAPSVEVKIQEHITAIKRVCNILPVSKVVVETAEFDLQLLKAIEEGKPIPQGEDYQRGEMYGHYNVRQYVLWRDGYTCQCCRAHSTNKKEVRLHVHHLESRKTGGDAPSNQITLCESCHKRFHKGLLTDKNLKKRKRRSTRDATFMGLLRATLMRRLRAELTIPVVETRGYITKATREKLLILPKSHTNDALSAVGSR

SEQ ID NO: 22594 - protein, 425 aa, unidentified
MVYTLNKDGQPLMPTDRHGKVKHLLKDGKAKVVKRCPFTIKLLYESTTHTQNLTLGVDTGSGTVGAAVSKDNGDIVYMSEVVVRNDITDKMTQRSKYRRNRRNRKTRYRKARWLNRKNSIKPDRFSPTMISKFHSHIKEIEYIRSILPITTMVFETGQFDTHLMKNPSLADPDIRHWGYQKGSNYGFENTKAMVLNRDGYTCQYCKDRHKDRKLEVHHIMFRSKGGSDEESNLITLCRTCHKDLHSGKIRPDFKGKTKGTLKYATQMNSIRKQLFRSYPEAAETFGYITKANRLAIGVAKGHYYDACTIATQGKPFIVKTSLYKKKCVSDGDFQKTKGTRSEQPIVTDKICGFRKFDKVQYFGKEYFIKGRMSTGYAILMNIDGKKADFSTMPKGCKIPKMTKLKRVEARTTWMVTAVEVTPNIA

SEQ ID NO: 22595 - protein, 431 aa, unidentified; identical to SEQ ID NO: 20431

SEQ ID NO: 22596 - protein, 375 aa, unidentified
LGVDAGSKTIGMSASTTKEELLSAEVKPRNDVVDLLSTRREFRRVRRNRKTRYRKPRFDNRVRSKHKEWLAPSVEVKIQEHITSIKRVCRILPVSKVVIETAEFDLQLLKAIADGKSVPQGEDYQKGEMYGHYNVRQYVLWRDNYTCQCCGAHATKKKEVRLHVHHLESRKVGGDAPSNLITLCDSCHEKFHKGIITAANLKKRKRRSMRDATFMGIMRKTLIQRLRAELTIPVAETRGYITKTTREKLLVLPKSHTNDALAIALGKHGFNVGYLPEIAQIDKIYTIRPVRHHNRQLHKVTILKGGIRKSNQAEKYVFGYRLFDKVQFNGQDCFIWGRRTTGIFTIKTINGKMIKDGISFKKLKPVEKSTSYLIA

SEQ ID NO: 22597 - protein, 414 aa, unidentified
MPCSPAKARLLLKEKKAIVVRRTPFTIQLTIATGESKQPVSLGVDAGYKHVGLSASTEKAELYASEVELRQDVSDLLSARRALRQSRRNRKTRYRAPRFDNRIRTKRKGWLAPSVENRINAHLSRIETVIRLLPVTKITVETTSFDMQLLKNSDIAGKEYQESEQLGFWNVREYVLFRDGHVCQHCHGRSKDPVLNVHHLESRRTGGDSPGNLITLCETCHKALHRGEITLKAKRGQSFRAEAFMGIMRWEVLNRLKASHPEQEVQNTYGYRTKHARIENGIAKSHCADAFCIAGNLGAERLGEFFFQKQTRRNNRQIHKLSILKGGIRKRNQAPFEVNGFRLFDKVACKGEEGFIFGRRSSGFFDVRKLDGTRISAGISYKKLHLLEKRRTYLTEIRKEEALPPLPEGRGLRA

SEQ ID NO: 22598 - protein, 411 aa, unidentified
MIYVRSKEGRVLMPTERCGKIGYILRHGKAHVVSRVPFVVQLDYDSTTYTQDVNLGVDAGSKHIGVSASSEKKELFAAQVELRSDIVKLLSTRRELRRNRRNRKTRYRKARFDNRKKKDGWLAPSVEQKIESHLKVIRLVHKLLPVTKTTIEVAQFDTQKIKTPDIKGDEYQQGEQMGFWNVREYVLARDGHKCVHCKGKSKDPILNVHHLESRKTGGNSPSNLVTLCETCHKAYHRGEFDLKIKRGSSLRDAAVMNIMRWAVYERAKKEFGNVHLTYGYITKHTRIENGITKTHAADAFCIAKNVHATRLGDFFLCRCVPRHTRILHVANPKKGGIRRSCIASHKIGKSRFQRYDMVQWKGMNCFIFGSTHGRPILRYIEGLQVANQPSVNIKTIKFLRRMRCSILVKCP

SEQ ID NO: 22599 - protein, 292 aa, unidentified; identical to SEQ ID NO: 2733

SEQ ID NO: 22600 - protein, 497 aa, unidentified
LVWNVQAPWDVYPSPTLCGLCLKVLRGRNGDADKKPIPTLTKDENRPSGRTTGLRAEQAEPAGIRKGDTLKVFVLNMRGQPLMPCSPAKARHLLKAGKAVVRRRTPFTIQLRIATGETKQSVTLGVDAGAKHVGLSAATEKEEVFASEVELRQDITGLLAARLSLRRDRRHRKTRYRAPRFLNRVRSKHKGWLAPSVESRIQAHMSRIDAVCRLLPVTKIVIETASFDIQKIRNPEVEGTGYQQGDQLGFWNVREYVLFRDGHICQHCRGRSKDPILNVHHLESRKTGGDAPNNLITLCETCHKAYHAGKIKLKVKRGQSFRAEAFMGIMRWTLLDRVRKAHPGLPVENTYGYLTKNTRITLGLPKAHCVDAYCIAGNLKAVRRGVCLHQRQVRKHNRQIHKCTVLSKTLKDGTKIGYRKLNQTPHLVKNFRLFDKVRCLGQTGFIFGRRSSGYFDVRRLDGVKLSPSISWRKLTLLEKRSTYLTELRKEDGASSPV

SEQ ID NO: 22601 - protein, 456 aa, unidentified
MLTYVLAADGSPLMPTYNIRKVRRMLKDGRAVMTGHKPGFTIRLTYALPDQKTPHTQKVELCEDTGYQHIGISAKSAKHEFVHLQVDTLADEKGHHDAQRRYRRARRGRLRYRAPRFDNRTYSKKPGWLAPSLQHKADIHVRLVSTFQRVLPIRDVYLEVGTFDTQALEAKEKGLPIPEGSDYQHGIRYGIATLREAVFYRDGYKCQCCGKGIKDGRILRVHHIGYWKTPSDHTDRMSNLITVCTKCHTAANHKRGGKLYGWQPKMKPLTGAAFMNTVRWKIVQAVKDLDSSLTVHTTYGAYTKLSRRDRSIGKTHANDAYCMGAFQPKHRATEQLLKKKRRNNRVLSKFYDAKYIDIRDGTKHSGSELSCGRTNRSEPRNGERNLRIFHGKKVSKGRIAVRKQRYPIQPGTVVLYHKRKIAVIGTHGNGTKVMLPTKKDVSPHKVAVVYHAGAFV

SEQ ID NO: 22602 - protein, 455 aa, unidentified; identical to SEQ ID NO: 10285

SEQ ID NO: 22603 - protein, 462 aa, Candidatus Methanoperedens
  source 1..462: note = sp. BLZ1
MKKLSKRNTYTPINASQVGCNCDLLLNRVDTLSVIDSKTLDNRSEVNQSEHRKQDLRVPVYVLNMRGQPLMPTKPAKAKHLLKNGKAKVVKRTPFTIQLKYATGETKQEIVLGIDSAFKIIGYSARTITAELISGEVLLRTDIPDKLKEKQMYRRGRRNRNTHYRKPRFLNRNIPKGWFAPSIGHKINSHLELIKRIKKLLPVTEIEIEVATFDTQKIQNPEISGIEYHQGELQDYEIREYLLEKFQRKCAYCKKTDIPLEIEHVIPSSRGGSDRVSNLTIACHKCNQKKGNKTAIEFGHPEIEEQCRKPLKAAAFMNTVRWELVKRLKELYGEVAVNHTYGYITKKLRKDLGLEKSHVNDAFAISKGTDQERCRPHVVKQNRRNNRSLQTNRNGFKPSIRRERYKFQPNDIVRYKGQTYPVKGVFNYGAWIRLQNENEKDINSNIKNVELITYGKGLQFGF

SEQ ID NO: 22604 - protein, 408 aa, unidentified
MVYVQDINGKPMMPTTRHGKVRRLLKDKKAIVVNLCPFTIKLMYVTSDYKQEIVLGVDAGTKHVGLSATTKSKELYSSEVILRNDIVDLLSTRRELRRSRRNRLRYRKPRFDNRIKSKRPGWVAPSVKYKVDAHIRVIDNVCSILPISRIVIEVAQFDTQKINNPNISGKEYQEGDQLGFWNVREYVLAKDGHKCQHCKGKSKDPVLNVHHIESRKTGGDSPSNLITLCETCHKEYHKGNIDLKIKRGKSLRDAAVMGIMKWRLYEELKSKYDNISMTFGYVTKYNRIKHGIEKSHVFDAFVISKNFDAIRLGYYYKVRLVRRHNRQIHKQKIQKGGIKRLNQSPFEVFGFRLFDRVMFENSYYFIFARRKTGSFNIRDIDGKNQRDITYKKLKLSRCKRFMVQKEMD

SEQ ID NO: 22605 - protein, 479 aa, unidentified
  VARIANT 207..224: note = X can be any naturally occurring amino acid
MNVVYVLSPERAPLMPCSCVIARLLLKQGKAKVVRRTPFTIQLLARPENAYTQPLTLGVDTGSSVMGSAVADENGNVLYLSEVEIRNDIAQTMKERAASRRHRRHRKTRYRKARWLNRKNSTRTGRFSPTMTSKIDAHLREIRLVQWVLPITSIVLETGTFDPHALKNPEVLQNKWLYQKGINYGYANTKAYVLTRDGYTCQHCKGXXXXXXXXXXXXXXXXXXNLLTLCKTCHDGLHAGTVTLKQRGKRKGNLLHATQMNSIRNQLLQRVQAEETWGFVTKEHRLLAGLPKAHIFDAAMIATRGTKPVFQTSSVLRKKCVPDGDYQQTKGVRSEQRIPTGKISGFRKFDKVRYLGHEYFIKGRMATGYAILMDIFGNKLALKPIPKLEQMKQVSARSSWILQQRPIPSASAGRSYKADLKHHFWKEPFRVMATSIGRLAMPARRPFVTLLSTKAKRQRFIHEAEDLVVFSPSFYKIHS

SEQ ID NO: 22606 - protein, 416 aa, Parasutterella sp.; identical to SEQ ID NO: 10114

SEQ ID NO: 22607 - protein, 204 aa, unidentified; identical to SEQ ID NO: 14204

SEQ ID NO: 22608 - protein, 423 aa, unidentified
MVYVLNIDGQPLMPTDRHGKVRHLLKDGRAEVVKCCPFTIRLLYDSTHYTQDIVLGVDAGSKHIGLSGTTETKELYASDVELRNDIVDLISTRRQNRRFRRNRKTRYRKARFLNRLSDKKDWLAPSIRQKVDTHMTVVSRVCMILPVTKIIVETASFDIQKIKDPDISGTGYQQGEQLDFWNVREYVLSRDGHTCQCCKGKSKDPVLNVHHIESRKTGGDAPNNLITLCETCHKSYHSGAVQLPKAIHRGMRFKDAAFMGVMRWNFYNKLKEIYELQGIEIRMTFGYLTKNTRIRHHLPKEHYIDARCISGHPEAIPSNEVFYQKKVRCHNRQIHKNTILKGGIRKRNQAGYLVKGFRLFDKVAYKGREYFIFGRRQSGFFDLRNLSGCKVNKGSLSYRKIGFLEPRQYYLCERRVMDTQGYA

SEQ ID NO: 22609 - protein, 434 aa, unidentified; identical to SEQ ID NO: 7534

SEQ ID NO: 22610 - protein, 532 aa, unidentified
MLTRVSSPRSDRPSEGNSVATSVHDRLRGASSAPDSRTAPCRHAGSGTKRGRGDRRVAPFPRGVSGMVSSAPLRPSAQANGQLGRGNPSPYVLVLDERHQPLMPCHPARARVFFRQGRAVVVRHSPFTIRLRDRVGGDRQPVLLGIDPGSKCTGLAVVRQAGETRHALWLGELHHRGEQIRQKLAQRRAYRQRRRTANLRYRAPRFQNRRRPAGWLPPSLYHRVETTIQWVTRLQRWIPISEIAMELVRFDTQALQEPEISGVEYQRGTLWGYEIREYLLEKWGRHCVYCRTTSISLQVEHIIPRSRGGSSRVSNLTLACERCNQRKGNQTAKEYGFPQVQAQAQRPLHDATVVNSTRWTLYHALQTFGLPVAVGSGGRTKWNRLRFGISKRHALDALCVGEVEGVRRWLVPSLIITATGRGAYQRTRVTRHGFPRGILMRRKESHGFRTGDLVRAIVPTGRNSGTHVGRLAVRASGSFNLKTVVRTVQGISHRYCRLLMRADGYTYHWSLTPHKDAPPPRPKGKDLRREAS

SEQ ID NO: 22611 - protein, 415 aa, unidentified; identical to SEQ ID NO: 10543

SEQ ID NO: 22612 - protein, 442 aa, Lactobacillus sp.; identical to SEQ ID NO: 5193

SEQ ID NO: 22613 - protein, 465 aa, unidentified
MSTCVCVLSNNGERLMPTIRLGRVRHLLKDGKAKIIKHHPFTIQLLYDSKTNTQPIEICEDVGYNYIGISVKSQSHEYVSAQYDTLQDEKACHDSFRKLRRTRRNRLRYRKPRFDNRKRGEGWLAPSLKHKKELNVNVVKMYCTVMPITHATVEVGSFDTMLVKAIQEGKVIPEGADYQKGPRYNLATLREAVFYRDNYVCKICGRKATEGTILHMHHMFYWKGRHGNSLNELLTVCEKCHTPANHQKSGKLYGFGEKIKFADLSGAAFMNTVRWQIVNELYVAFGKPFVTITYGAMTKEKRIALQLEKSHNNDAYAMGEFHPNLRCMFEHYEKARRNNRILEKFYDSRYIDIRTGEIATGKELFNGRINRNHKKDSENLHKYRGKRTYAGHRALLRKKVNLNPGDLVSLNGENLIVHSTHTKKNGAVNVEFETPAKSGQKSESLKKLKIVKAANSIHPAWKKIS

SEQ ID NO: 22614 - protein, 413 aa, unidentified
MTNYAFVLDANNKQLTPTKEQKAWFLIRKKRATLVSKYPMVIQLKKKIPDKEICKDEVRCGIDDGGLHVGVALVQKCQTRNKVVFKGVIEQRNDVKHLIDVRCGYRRYHRYHKRYRSARFNNRNSSKREERIAPSILQKRQATIRVINQLNKWINITNYWLEDVAIDIRALTDGYKPYRWQYQKSNRLDENIRKAVILRDGCKCMECGKSNCRLEVHHIKPRRLKGSSTLDNLITLCTKCHQKTESVEELYMDRYFALLNSSDNKNLNYAQHVMIGKKWLREQLSNLGMLYLTNGGDTANKRIDWDIAKSHSNDAICITDLRPDTCEIKEWAIKPMRRQSKAKTDNVLGIKHRDLVEYTFRNGKTHRGYVTALYPEQNAINFQSPTKHCKKVNAKKCKVLWKYSKIYWLDNVG

SEQ ID NO: 22615 - protein, 462 aa, unidentified; identical to SEQ ID NO: 2823

SEQ ID NO: 22616 - protein, 442 aa, unidentified; identical to SEQ ID NO: 3234

SEQ ID NO: 22617 - protein, 416 aa, unidentified
MVYVLGQDGHPLMPTCRHGKVKRMLKSGMAKVVKKCPFTIQLQYESTTHTQKINLGIDAGSKTIGVSATTESKVLYESEVVLRNDIVELLSGRRALRNSRRSRKTRYRKPRFDNRKKPDGWLAPSIRQKIETHVTVVGNVMKILPVTKIIVETASFDIQKIKNPEIEGAEYQHGEQLDFWNVREYVLFRDGHTCQCCKGKSKDNILNVHHIESRKTGGNAPNNLITLCETCHKAYHKGIITLPKEIHRGMRFRDAAFMGVMRWAFYDRLKELYNLLGVEVINTYGYITKNTRITYDLPKEHYVDARCISGNPAAKPMDYYYLQKKVRCHNRQIHKCKINKGGTRKRNQAAYEVKGFRLYDQVLWKGQKCFIFGRRSTGRMDLRLLDGTHVNASVGYKNLKLLSMRKNYLIEQRKAG

SEQ ID NO: 22618 - protein, 455 aa, unidentified
VSFTVRYVLAYRFKHIKKERKVPCMVYVLDINGQPLMPTTRHGKVRRLLNSHLAKVVKRCPFTIQLLYQSTKEIQPVSLGVDAGSRHVGLSATTEREVVYQEELVPRNDIVKLLSARRALRRSRRNRKTRYRRVRFNNRVHSKHKGWLAPSVEVKIQEHITATKRICQILPIFDIHVETAEFDLQRLKAMEEGRLLPAGTDYQLGEQYDFYNTRQYVLHRDEYTCQCCGTHDNNVKLHVHHVESRQTGGEAPNNLITLCEHCHKSIHAGKMMLPKGKKRGKSYRDAAFMGIMRNTLLERLRKEVNVPVTMTYGYITKYWREKAGLEKSHINDAICISKHPYARPLETYYLTKAVRHHNRQIHKTKFSKGGIRKRNQAPYLVKGFRLFDKVLYQGESYFIFGRRITGYFDIRTLDGTKVNKGSTSYKKLRIQDTAEAYLTEVRAIPHMNEFTCVLA

SEQ ID NO: 22619 - protein, 424 aa, Moorena sp.; identical to SEQ ID NO: 13637

SEQ ID NO: 22620 - protein, 480 aa, unidentified
LYTKPLDNIGEGSLPPSGEINLKGMTFMVYVKSIDGKALMPTSNAKARKLLKQKKAKVVSLRPFVVKLTYKTKTEYTQKLNLGVDSGYSNIGFSVIDAKQEYIAGEVKLLEGMKKRLLEKASYRRIRRSRLRYRKARWNNRVKSKKKGWLAPSLKHKLDTHIKFIDYLKNILPIGKITIEVANFDIQKMKDDLISGVDYQNGDMFGFWNVREFVLHRDGHKCQNPNCKHKDKKEQILKVHHIRYRSEGGSDRPENLITLCSKCHTPANHKKGKFLYDWCVNGKKVRGFKDATFMSMIRWYLVNELKSKHNNVSITYGYITKNHRIQNGIEKSHLNDAFAIAKGTNQARTKDRFLVIQDRLKNRSLEKFYDSKIIDIRTEKKVSGGDLNCGRSTRNKNLNTENLRKYRGVKISKGQRRIRKQKYFYQPNDLVKYDGKVYTVKGTQNEGKYIALKEIKKVPKVELLIPYVFKKGLNWSYGLC

SEQ ID NO: 22621 - protein, 412 aa, unidentified; identical to SEQ ID NO: 4932

SEQ ID NO: 22622 - protein, 457 aa, unidentified; identical to SEQ ID NO: 3236

SEQ ID NO: 22623 - protein, 443 aa, Anoxybacillus sp.; identical to SEQ ID NO: 12144

SEQ ID NO: 22624 - protein, 420 aa, unidentified
MQYVYVLNKHGEPLMPCSPGKARLLLKQQKACVVKRTPFTIKLLFGSAGYKQPITLGVDAGSKHVGLSASTEKRELYSEEFTPRSDVVELLSTRRQNRRSRRNRKTRYRVPRFDNRVHSKHKGWLAPSVEVKIQEHITIIKRICKILPISLVRVETAEFDTQRLKAMLAGKPLPVGTDYQLGEMYDEYNVRQYVLKRDNYTCQCCGAHTTAKKLVKLHVHHLESRKTGGNAPSNLVTLCTTCHKNLHKGKVTLDGKERGKPLRDAAFMGIMRKTLMVRLKEELPIPVQGTYGYITKMRREQNDIKKSHTNDARCISKHPLAEPCSVCYRTKANRHHNRQTHKANFSKKGIRKRSQMPYLVEGFRLWDKVLYKGQECFVSGRRSSGSFALKKLDGTSISKGVTFKKLRLLEPATNYLIERM

SEQ ID NO: 22625 - protein, 416 aa, unidentified; identical to SEQ ID NO: 14767

SEQ ID NO: 22626 - protein, 344 aa, unidentified; identical to SEQ ID NO: 11841

SEQ ID NO: 22627 - protein, 418 aa, unidentified; identical to SEQ ID NO: 6784

SEQ ID NO: 22628 - protein, 442 aa, unidentified
MVYVLNKDGQPLMPTNRHGKVRRLLKTKKAKVIKRCPFTIQLLYDTTNHTQDITLGIDAGSKHIGLSATTKNKVLFEADVELRNDISKLLEARHTFRCSRRNRKTRYRKKRFDNRVSSKHKGWLAPSIEHKIQSHFAMVEKVHRILPVTKIVVETASFDTQLLKAQLEGKPIPQGTDYQNGELAGWNIREYIFHRDNYTCQWCRGKSKDPVLVTHHHAYWKGDHTNKPSSLITLCNTCNDSKYHKKGANRLWGWEPKITNSYKHAAFMGVMRWTFYNRLKEIYPNVSMTYGYITKNTRIENNLPKAHYVDARCISGHPEAKSSGEYFYYKKVRCHNRQLHKANTLKGGIRKRNKAEYIVKGFRLFDRVEYQNNEYFVFGRRASGFFDIRTLDGQKVNKGSISFKKLKLKETSRTYLIERRMADTGVSLAPLTTEVTSLRQTG

SEQ ID NO: 22629 - protein, 431 aa, unidentified; identical to SEQ ID NO: 4463

SEQ ID NO: 22630 - protein, 419 aa, Geobacillus sp.; identical to SEQ ID NO: 4579

SEQ ID NO: 22631 - protein, 554 aa, Acidithiobacillus sp.; identical to SEQ ID NO: 7890

SEQ ID NO: 22632 - protein, 461 aa, unidentified
VQPLYLGIDPGRTNIGVAVVKADGTAVFTAHLETRNKEIPKLMKKRKDSRRARRTNGRRCRRQRRAKANGTISKKCVKQTTAQNGSVSKRAKEIGVIKRHLPGCEKDVLCIGIKNKEAKFSNRTKSEGWLTPTANQLLQTHINLVKKIRKFLPISDVVLEINKFAFMQLDNPNVQKWQYQQGPLYQKANLEEAVSEMQEHHCLFCKKPIAHYHHVVPQSENGSNTIGNIVGLCTKHHDLVHKDTAWQKKLAKKKTGLNKKYGALSVLNQIIPALTKELGSLFPKHFFATNGKSTYDYRAAHGVRKDHWLDAYCIACSVLPNDVCDKNINSRVLYELKQFRRHDRRALNNENMSRVYTLNENVVATNRHKATKQTTDSLEEFRQNHPDDACKLKVKEHHPTYRNMSRNYPGSVFLVGNQVHVMQGVAGSKDGKATTYKDTNANSIAAGKCKFVAKNSGILFV

SEQ ID NO: 22633 - protein, 493 aa, unidentified; identical to SEQ ID NO: 10490

SEQ ID NO: 22634 - protein, 442 aa, unidentified; identical to SEQ ID NO: 6360

SEQ ID NO: 22635 - protein, 431 aa, unidentified
MDAWDIIVILNKRGKPLMPCSPAKARLLLKEKKAIVVRRTPFTIQLTIATGEAKQPVSLGVDAGYKHVGLSASTEKAELYASEVELRQDVSDLLSARRALRQSRRNRNTRYRAPRFDNRIRTKRKGWLAPTVENRINVHLSRIETVLRLLPVTKITVETASFDTQLLKNPDIAGKEYQEGEQLGFWNVREYVLFRDGHVCQHCHGRSKDPVLNVHHLESRRTGGDSPGNLITLCETCHKALHRGDITLKAKRGKSFRAEAFMGIMRWEVHNRLRALHPGIEVSNTYGYRTKHARIANGIAKSHCADAFCIAGNLGAERLGEFFFQKQTRRNNRQIHKLSILKGGIRKRNQAPFEVKGFRLFDKVACQGEEGFIFGRRSSGFFDVRKLDGTRISAGISCKKLHLLEKRRTYLTEIRKEEALPPLPEGRGLRA

SEQ ID NO: 22636 - protein, 510 aa, unidentified
TVYVLNKDGKPLMPTTRCMHVRHLLKNGKARVVKSKPFTIQLLYETDDVVQPLYLGIDPGRTNIGVAVVKADGAAVFTAHLETRNKEVPKLMKKRKESRCARRTNGRRCRRQRRAKTNGTISKKCVKQTTAQNGSVSKRAKEIGVIKRHLPGCEKDVLCIGIKNKEAKFTNRARPEGWLTPTANQLLQTHINLVKKIQKFLPISDVVLEVNKFAFMQLDNPNIQKWQYQQGPLYQKGSLENAVSEMQEHHCLFCEKPIEHYHHVVPKSENGSNTIANIVGLCTEHHNLVHKDATWQKKLAKEKVGLVKKYSALSVLNQIIPALTKEMNSLFPKHFFVTNGKSTYDYRTAHGVSKDHWLDAYCIACSVLPNDVCDSNINSHVPYELKQFRRHDRRVLHKANMSRVYTLNGKTVATNRHKAIKQTTDSLEEFRQSHPGDVCKLKVKEHHPAYRNLNRNYPGSVFLVDGQVHVMQGVSGSHNGKADGYYNTNGNAYPYYKCKFVVKNEGIVFA

SEQ ID NO: 22637 - protein, 420 aa, unidentified
MQYVYVLNKHGEPLMPCSPRKARLLLKQKKACVVKRTPFTIKLLYGSTGYKQPITLGVDAGSKHIGISAATEKYELYCEEATPRNDVVDLLSARRAFRRSRRNRKTRYRAPRFNNRVHSKHKGWLAPSVEVKIQEHITLIKRVCRILPVTFVRVETAEFDTQRLKAMLEGKPLPVGTDYQLGEMYDEYNIRQYVLKRDNYTCQCCGAHPTKTKAVKLHVHHIETRRTGGNAPNNLITLCTACHKALHAGKVTLDGKKRGRSLKDAAFMGVMRKTLMERLLKELKIPVQGTYGYITKYLREKHSIPKSHTNDARCISKNPLAIPCDTCYYTKAIRHHNRQLHKATILKGGIRKANQAPYTVKGYRLWDKVSYNGSECFITGRRTSGYFALKKLDGTVVSNSASYKKMRLLEVATNYITERR

SEQ ID NO: 22638 - protein, 426 aa, Anoxybacillus sp.
MVFVLDTNKRPLAPCHEAVARKLLKQGKAAIYRRFPFTIILKKSVDESEIKATYRLKIDYGSRHTGLAILRGQEVVWLGQLDHRTDIKERIDKRRAFRRARRNRKTRYRKPRFLNRKRKEGWLPPSLESRVQNIQTWVERLRKICPIEHISYENAKFDTQLMRNPEINGVEYQQGTLQGYEVREYLLEKFGRKCCYCGKENVPLEVEHIIPKSRGGTDRVDNLCLACHDCNQRKGSKTAEEFGYPHIQKQVKESLKDTSAINSTRWKAYEVLKQTGLDVECGTGARTKMNRIRLDLPKTHYFDACCVGESTTNHLYFKTKEVLFIKAKGRGSRSRTNLDRYGFPRGYLARQKFFFGFQTGDMVKAVVPRGKYQGVWFGEVACRKTGSFDIKGKDGKRIAQGINYRYVQVIQRFDGYAYGKGVAELA

SEQ ID NO: 22639 - protein, 431 aa, Thiorhodovibrio sp.
MNRVFVLDTNKRPLMPTSPTRARRLLRDKKAAVYRMHPFTIILKYSVEPTPQPIEAKFDPGSKTTGIALVAEFPQQGRVVLWAANLNHRGDSIRKRLADRRAIRRGRRNRKTRYRQMRVLNRKRPQGWLPPSLQSRVDNVENWLKKLLDRAPLVTVAVETVRFDTQAMQNPEISGVEYQQGELAGYELREYLLEKWNRTCAYCDAQHVPLEIEHIVSRSKGGSDRVSNLTLACRDCNQKKGNQPLEVFLAHDPKRLARIKAHAKAPLKDAAAINAIRYAIGNALKKFGLAVSFWSGGRTKKNRVSQGYTKDHWIDAACVGETGAEVHIPDGMRPLTITATGRGQRQVTRTDRHGFPRGKAGRVKRVNGFQTGDFVKLIQPKGKYAGVHVGRLAGIRSTGTFDIAANVGKFSANWKNFVLIQRGDGYAYAYA

SEQ ID NO: 22640 - protein, 470 aa, unidentified; identical to SEQ ID NO: 2825

SEQ ID NO: 22641 - protein, 351 aa, unidentified
TTEKHELYREEATPRNDVVDLLSARRAFRRSRRNRKTRYRAPRFNNRVHSKHKGWLAPSVEVKIQEHITLVEHVCRILPVTLVRVETAEFDTQRLKAMLEGKPLPVGTDYQLGEMYDEYNVRQYVLKRDNYTCQCCGAHSTKTKGVKLHVHHIETRRTGGNAPNNLITLCTACHKALHAGKVTLDGKKRGKPLKDAAFMGIMRKTLMERLRKELKIPVQGTYGYITKYLREKNGIPKSHTNDARCISKNPLVIPCDTCYYTKAVRHHNRQLHKATILKGGIRKANQAPYIVKGYRLWDKVSCNGTECFITGRRTSGYFALKKLDGTVVSNSISYKKLRLLEAATNYIIERK

SEQ ID NO: 22642 - protein, 350 aa, unidentified
MSKVFVLDTNFTPLNPIHSAQARQLLRNKKAAIFRQFPFTIILKKSRPDSRISSLRLKIDPGAKFTGMALVNDSTSEVVFAAELKHRGFAIRDALTSRRQLRRSRRARKTRYRQPRFLNRTRLEGWLAPSLQSRVDNIKTWVKKLLNFAPIQAISQELVRFDMQLMANPDIQGQEYQQGTLAGYETREYLLEKWGRQCAYCGVKDVPFQVEHIHPRAKGGSNSITNLTLSCEKCNTKKGTKDIKDFLKKDFSKPLLITANGHGSRQSCRIDKYGFPNRHVPREKIHFGFQTGDIAKAVVTAGKKIGTYVGKVAIRSTGSFNISNKNGLIQGISHKFCKRIHAKDGYSYAV

SEQ ID NO: 22643 - protein, 431 aa, Escherichia sp.; identical to SEQ ID NO: 3801

SEQ ID NO: 22644 - protein, 411 aa, unidentified
MVYVQDIDGKPMMPTTRHGKVRRLLKDNKAVVVNTCPFTIKLTYKTSDYKQEIVLGVDAGTKHVGLSATTKSKELYSGEVILRNDIVELLSTRRESRRTRRNRLRYRKPRFENRVKSKRLGWVAPSVRHRIDAHIRIINNVCSILPVSRVIVEVAQFDTQKIKNPEISGKEYQEGDQLGFWNVREYVIARDGHKCQHCKGKSKDPILNIHHIESRKTGGDSPSNLITLCETCHKEFHKGNIKLKVKRGKSLRDAAVMGIMKWRLYDKLKSLYPNVRMTFGYITKYNRINHGIEKSHVSDAFVISRNFDSERLGYYYKLKLVRRHNRQIHKMKIPKGGKKRMNQSPFKVFGFKLFDKVMFQGEERFIYARRLSGQFKIKDIDGNNERNISYKKLRYVSHGLVSVKTNLFLSQ

SEQ ID NO: 22645 - protein, 214 aa, unidentified
AHNTAKKVVKLHVHHLESRKTGGNAPSNLVTLCTTCHKNLHKGKVTLDGKERGKPLRDAAFMGIMRKTLMARLKEELPIPVQGTYGYITKMCREQNDIKKSHTNDARCISKHPLAEPYSVCYRTKAIRHHNRQTHKANFSKKGIRKRSQMPYLVEGFRLWDKVLYKGQECFVSGRRSSGSFALKKLDGTSISKGVTFKKLRLLEPATNYLIERM

SEQ ID NO: 22646 - protein, 423 aa, unidentified; identical to SEQ ID NO: 3951

SEQ ID NO: 22647 - protein, 424 aa, unidentified
  source 1..424: note = uncultured cyanobacterium
MSNYALVLDTNKQPLSPCHPSVARKLLDSGKAAVFRMYPFTIILNKSCSDVVNQAIELKIDPGSKTTGIALVQGEKIIFGAELSHRGSAIKASLESRRSLRRGRRNRHTRYRQARFLNRTRTKNWLAPSLQHRVETTLTWVKKLIKFAPITRISQELVRFDLQQIDNPEISGIEYQQGTLSGYEVREYLLEKWQRKCAYCGIENVPLQVEHIHPKARGGTNRISNLCLACQKCNIKKSTQDIEKFLAKKPDLLKCILAQAKRPLKDAAAVNSTRWALFSRLQETGLPVSTGSGGQTKFNRTRLKFPKTHWLDAACVGQIGELEILINKPLLIKATGHGTRQMCRTDKFGFPSRYVPRIKFVKGFQTGDIVKAIVTTGKKIGKYIGRVAVRATGSFNISASKLVQGISYKYCKIIHRKDGYDYAF

SEQ ID NO: 22648 - protein, 391 aa, unidentified
MVYVINKQGQALMPTERFGKVRRLLKNSLAHVVCRIPFTIQLDYDTTDYTQPVSLGVDAGSKHIGISVTTSEKELYAADVELRNDIVDKLSTRREQRRTRRSRLRYRKARFNNRASSKRKGWLAPSIENKIQTHLTVVEKIHKFLPITNIVVETASFDIQKINNPSISGSEYQQGEQLDFFNVREYVLFRDNHTCQHCKGKSKDKVLNVHHIESRKTGSDSPKNLITLCETCHKAYHRGEFELNVKRGKSFRDAAFMGIMRWSFYDRLKNIYPNVSMTFGYITKNTRITNNLPKDHYVDARCISGNPVAKPLGYYFYQKKVRCQNRQIHKANFLKGGRKKLNQAPFLVKGFRLFDLVEYQKELYYIFGRRSSGSFDIRKLDGTKVNKGSIN

SEQ ID NO: 22649 - protein, 432 aa, unidentified; identical to SEQ ID NO: 6011

SEQ ID NO: 22650 - protein, 281 aa, unidentified
SKVVIETAEFDLQLLKAIEEGKPVPQGEDYQQGEMYGHYNVRQYVLWRDDYTCQCCGAHATKKKEVRLHVHHLESRKTGGDAPRNLITLCDSCHKKHHDGLITEDDFKKRKRRSTRDATFMGIMRKTLIQRLRAELTIPVAETRGYITKATREKLLVLPKSHTNDALAIAQGKRGFNVGYLPGIIQTDKIYTIRPVRHHNRQLHKATILKGGIRKSNQAEKYVFGYRLFDKVQFNGQDCFIWGRRTSGYFVVKTIDGKVIHNSASFKKLRLVERASNYLIA

SEQ ID NO: 22651 - protein, 226 aa, unidentified
LKRDHYTCQCCGAHNTAEKVVKLHVHHLESRKTGGNAPSNLVTLCTTCHKNLHKGKVTLDGKERGKPLRDAAFMGIMRKTLMARLKEELPIPVQGTYGYITKMRREQNDIKKSHTNDARCISKHPLAEPCSVCYRTKAIRHHNRQTHKANFSKKGIRKRSQMPYLVEGFRLWDKVLYKGQECFVSGRRSSGSFALKKLDGTSISKGVTFKKLRLLEPATNYLIERM

SEQ ID NO: 22652 - protein, 398 aa, unidentified
NRLHKVREHLYRSCRQRDPGSRETGAAVVRDDGKKRHHALAFFVIEHRGGAIRDALKARSAFRRRRRSQNLRCRSPRFLNRVKPKGWLPPSLRHRVETTLSFVRRMCRYLPVSGIAAELVKFDSQKLQTPEVSGIEYQQGTLFEYEVREYLLEKFGRKCVYCGAEGVPLNIDHVVPRAKGGSNRVSNLVLACVSCNQKKGARSLEDFLKGKPEVLARVRRELKTPLRDAAAVNATRWVLFNELKATGLPVETGSGALTKFNRHAFGVEKEHWLDALCVGRLNGAVTRKGLNVLEIRCMGRGSRQRTRLTKYGFPRGYLMRQKCVHGFATGDMVEANVPKGKKAGLWRGRVAVRVSGSFNIQTPKGVIQGVGWKHCRLISHNDGYGYAWLGHAPHSSPA

SEQ ID NO: 22653 - protein, 432 aa, unidentified
MVVYVLSKNKEPLMPTKHFGKVRHLLKDGKARVVKSCPFTIQLLYETTTYTQDLTLGVDTGSGEIGCSVTTENVDKNGQKHILYKSNVEVRNDIKSKMDRRRKYRRTRRSRKLYRPVRFQNRKNSKRTDRFSPTMISKIHSHVKEIEFIQKILPITKIVLETGQFDTHLMQNPNLSNSNVKHWGYQKGPNYGFANTKARVLNRDGYQCQYCKTKKKGTRLDVHHIIFRSHGGSDDAENLITLCHSCHVALHKGQIQPNFKGKKKGNLNYATQMNSIRIQLLRYYPDAIETFGYITKENRQKLGLPKDHYIDACVIATGGVSFIDDTNLVYYKKSVAKGDYQQTKGSRSEVKLPTGKIYGFKKFDKVLYRGHEYFIKGRMSNGYCILMDIHGNKIDFSNQPKGFKTPKFENLKRIGGRTSCLVIAEVDTLNIV

SEQ ID NO: 22654 - protein, 413 aa, unidentified; identical to SEQ ID NO: 3476

SEQ ID NO: 22655 - protein, 544 aa, unidentified
MKQKKQKVMVYILNKKGKPLMPTTRCGHVRKLLDSKKAVVVNSNPFTIRLKYDTPNGIQDVFAGIDSGRENIGSGASNEDGDCLYLGELKTSNKSIKIKMAERTGFRRERRRHDRQSKQRKAKKDHTEIQNGNDDICRTTISCKSVQISYPVAEESVTHKIIRGKEGKFANRHRDEGWITPSARQLVQMHMNDLKSMCKILPINHVTLERVAFDFQKLENENIKTWEYGKGKLYGYDSPEEYIHDVQDGKCLVCGKPHIDYLHHIIPRSKGGSDKVSNIAGLCYDCHYGPMGVHNCQDTQNRLPELKNEANKQYKVSLLNSVMTVLIEEMDKFCKANSIIFSICEGHDTAKVRDMYDLQKDHCFDGFAISLVGRNVESVDVIPDRIYQKQRYKKKSKNIIQKRNCREYYDGKKLVAVNRHKGTDQKADSLEEYMNTYAETHTADECKKHFDSLTVKPARRTYTFHKKGCICPFHIGDKVRYEKKNKIKGNTKVETFICESIHFYKDKNKAKVEHNKTKSKRMKFCRVLEAGCTPYIDYRKLALM

SEQ ID NO: 22656 - protein, 423 aa, unidentified; identical to SEQ ID NO: 4062

SEQ ID NO: 22657 - protein, 518 aa, unidentified
MTHYERRHLMPDTNYIYVLGTDGKPQMPTKRKRHVKRLLNTGKARIACHVPYTIQLLYKNEPVLQPVMLAEDPGRTNIGLAVLSRKGELLLSAVAETRNREIVKLMADRKKARRASRNGERKARQRLAKRFGTMFEAGMLMRKLPMYAADKFVTCNYIKNTESRFCNRKRPDGWLTPTANQLLKTHINLIHKIQKYLPVMDVAIEVNRFAFMSLENPAISGVDFQNGPLKGFDSLHDAVNDLQHGKCLLCGGKIEHYHHIVPRSQRGSNTIGNIAGLCMECHNKVHKNIEYQKELKDLKKGLDKRYGALSALNQAMPFICKSLESEFGKAHVSYCTGRDTAKMRNSFGFQKTKENQLHEVDAWCIGILARNSAPDRLPDFEQTHYIRQFRRQDRSLIRCQTERTYKLDGKTVAKNRKKRTDQKDDSLEDWYNKQIALHGKKIAECMLSRLTVKKSKRHYNDLTRTLPGAVFIYNGKCYVLSGRLSNGKYFRTVGDPKTNYPVGKCRIVKQNEGLVFIY

SEQ ID NO: 22658 - protein, 415 aa, unidentified; identical to SEQ ID NO: 3582

SEQ ID NO: 22659 - protein, 415 aa, unidentified; identical to SEQ ID NO: 6534

SEQ ID NO: 22660 - protein, 413 aa, unidentified; identical to SEQ ID NO: 16495

SEQ ID NO: 22661 - protein, 418 aa, unidentified
MVYVLNKNGGPLMPTERHGKVRRLLRDGKAHVVRLVPFTIQLDYSSEGVVQEVSLGVDAGSKHIGVSATTEERELLAMQVEERNDIVELIASRRETRRTRRSRKLRYRASRFDNRRRKDGWMTPSTEYRISAHLRMIHLVCSILPITKTTIEVAQFDAQKIKNDKITGVEYQQGEQLGFWNVREYVLARDGHVCQHCKGKSKDKILNVHHIESRKTGGNAPNNLITLCETCHKAYHDGEITLKLRRGTSLRDAAAMSIMRWEVYNRAKQEFKNVHLTYGYVTKHARIHNNIAKTHCADALCISGNVGAERLSWFYGVRLTRRHNRSLHLFKPKKGGFRPGNLASHWIGKSRLQQYDYVEWKGQRAFVSGSSNGRPYLKNFDDKYIMTPKASVNAKMVKFIRRKRGSMIIDKINQTKIS

SEQ ID NO: 22662 - protein, 400 aa, unidentified
LYDTTNHTQDITLGIDAGSKHIGLSATTKNKVLFEADVELRNDISKLLEARHTFRCSRRNRKTRYRKKRFDNRVSSKHKGWLAPSIEHKIQSHFAMVEKVHRILPVTKIVVETASFDTQLLKAQLEGNPIPQGTDYQNGELAGWNIREYIFHRDNYTCQWCKGKSKDPVLVTHHHAYWKGDHTNKPSSLITLCNTCNDSKYHKKEANRLWGWEPKITNSYKHAVFMGVMRWTFYNRLKEIYPNVSMTYGYITKNTRIENNLPKAHYVDARCISGHPEAKSSGEYFYYKKVRCHNRQLHKANTLKGGIRKRNQAEYTVKGFRLFDRVEYQNNEYFVFGRRASGFFDIRTLDGQKVNKGSISFKKLKLKETSRTYLIERRMADTGVSLAPLTTEVTSLRQTG

SEQ ID NO: 22663 - protein, 415 aa, unidentified; identical to SEQ ID NO: 15716

SEQ ID NO: 22664 - protein, 499 aa, unidentified
MRYVYVLDQEGKPLMPTCRFGKVRRMLKSGQAKAVSTLPFTIRLTYKPKTQSRQAVVVGFDPGRTNIGLAAVREDGTCLYRAHCTTRNKEIAKLMKDRLASRRASRRGERLARKRLAKKFHTTAKKLLKRILPGCKEPLAVKDIINTEARFNNRLRPQGWLTPSATQLLRTHLNLLKKIQKILLVTDVVAELNRFAFMQLDTPGVCKKNIDFTHGALYGTDGLHAAIREQQQGRCLLCGYREIEHFHHIIPRSKLGSNTIANLAGLCEKCHELVHKNAAAAEKLQEFKSGLEKKYGGTSVLNQIIPALMRTLSERFSGHAYATTGWQTKQFREDHELEKDHDIDAYCIAASILQQITTNISVESYEILQFRKHSRANIHHQTERTYKLGKELVAKNRHKRMDQKTDSLQEWYEDMFAKYGEKQANKLRSKLTVQKSTRHYNSKERLLPGTIFSYEGSRYVLTGQLTGGAYYRAYGQEKKNFPAKKVSIQCQNEGLVYVS

SEQ ID NO: 22665 - protein, 390 aa, unidentified
MITAFVIQLNYHAPEYTQPIAAKLDAGFKRGGVALQSNGKITFRGEIIHRRYVNQPTKGQVMVVRRQRRRARRYRIRYRAPRFDNRRRPEGWLPPTIKARADAQVNVLKVLARYAPVTRAIIEVGSFDAHKMQNPDVKPEGYQNGRQKGFKNTKAYIKARDRRCVNCGAEIEEVHHLKQRVKGGADNPDNLVGLCKKCHRLATMGKLKLNLTPGRELKGAAFINAAKNYIVSQVRRFAPEVCAQEGWWTKQERERWNLSKSHINDAISMGTAHLSVLYIPPGLNPMEIRPRQRAVRQQYFSEPRKGGVFKRYRHPWQSISGIKRGDLCRDKKTNQLIRVDTLLSNGKLNARVLKTGQRLVNIIPDRLQIVERGKGITFIPRKEAEPALLP

SEQ ID NO: 22666 - protein, 420 aa, unidentified; identical to SEQ ID NO: 6017

SEQ ID NO: 22667 - protein, 426 aa, unidentified
LAKDHYRSIDREETNLRVYVLNKRGEPLMPCSAAKARILLKEKKAKVKRRTPFTIQLTIATGETTQPVNLGVDAGYEHIGLSASTEKAELYASEIELRQDIPELLAARRALRGARRSRKTRYRAPRFDNRKRDKGWLAPSVENRIGAHVSRVEAVLRILPVTKIIVETASFDVQRLKHPDIQGVEYQEGEQLGFWNVREYVLFRDGHECQHCHGKSKDKVLNVHHIESRRTGGDAPNNLITLCETCHKAFHRGEFELKVKRGRSFQAEAFMGVMRWTFFERLRARHPEIEVRNTYGYLTKDTRIANKIEKSHCADAFCIAGNLKAKRLGYYFFQKQTRRHNRQIHKLTILKGGVRKRHQTPYEIKGFRLYDKVLYRGKVAFIFGRRSSGYFDIRTLDGERISASVSYKKLRLLEKRRTYLIELRRN

SEQ ID NO: 22668 - protein, 413 aa, unidentified
MTNYAFVLDVNGKQLAPTKEQKAWFRIRKKRATLISKYPMVIQLKKEISDEQICKDEICCGIDDGGLYVGVALVQKCKTKNKVVFKGTIEQRNDVKHLMEVRKGYRGYHRFHKRYRQARFNNRKSSKRKERIAPSILQKRQATIRVIKQLNKWINIANYLLEDVAIDIRALTDGYKLYRWQYQQSNRLDENIRKTVILRDDCKCMECGKSNCRLEVHHIKPRRLNGSNTLDNLISLCETCHQRTEGQEELYMDRYFSILNSTDNKNLNYAQHVMIGKKWLREQLSELGTLILTTGGDTANKRIDWNIEKSHSNDAICITGLQPDTCNVKEWTIKPMRRQSKAKTDNVLGIKHRDLVEYTFRNGETHRGYVTALYPEQNALNFQSPTKHCKRVNAKKCKLIWKYSKIYWLDNVS

SEQ ID NO: 22669 - protein, 426 aa, Methanosarcina sp.
MLVFVINQNKKPLMPCKPSKARKLLQAGKAKVVRNTPFTIKLLFRSSGYTQPVTAGMDTGSKVVGCAAIANGKVLYQSEIYLRENVSKKMEQRKMYRRTRRSRKTRYRPARFDNRGNSKKEGRLAPSIRSKLEAHFREKRFVESLLPVTEWKVELASFDIHKITNPEVSGIGYQEGDLKGFYNIKAYVLDRDGYTCQHCRGKSKDSRLHCHHIVFRSQKGTDAPENLITLCETCHKALHNGEFKLSGKKSKTKHATEVGIIKSQIRKSGWNFAETFGYETKYRREQVLKLLKTHYFDAVAICCRDEQKVEVEESVFLKRNVSKGDYQQRTGKRSEKKIHTGKLFNLRKFDLVKTSKGIGFVKGKRSSGFFAISDMFGNKISDSVNVKKICERLRARTSTLIQQSRTGKFTHSSPELKTQGFHAEGL

SEQ ID NO: 22670 - protein, 441 aa, unidentified
ERLMPTSEYRARKLLKSGKAIKHSYHPFTIQLTERETGDIQPIELCMDTGYIHIGISVKSEKHEYLAEQIDTLTNERSRHDACRMYRRQRRSRKRYRQARFNNRKRDQGWIAPSLEHKKKIHIQAISRINNVMPITDITLEMGNFDTQVLKAKEEGKPLPHGADYQHGGRYGIATLREAVFSRDGYKCQCCGRTIKDGVILHIHHIKYRSQGGTNSMSNLATVCDKCHTPKNHKPGGKLYNWKPKLSSFKGATFMTAIRWQLYNEVKALFPDIDIHITYGAATKERRRKLDIDKSHVNDAFVMGQFHPKHRIKAILCKKKRRNNRCLEKFYDAKYIDSRDGKKRSGQELFNGRINRNHKKNSENLHQYRLQKVTAGKRTVRKQHYKIQPHDIVIYESRKREATGCHCSGTRVMLLPDKKSVSIKKIKIYKYAGGYFKSAFN

SEQ ID NO: 22671 - protein, 350 aa, Microcoleus sp.; identical to SEQ ID NO: 19626

SEQ ID NO: 22672 - protein, 453 aa, Solobacterium sp.; identical to SEQ ID NO: 4156
  source 1..453: note = isolate UBA2929

SEQ ID NO: 22673 - protein, 414 aa, unidentified; identical to SEQ ID NO: 4924

SEQ ID NO: 22674 - protein, 354 aa, unidentified
  source 1..354: note = Euryarchaeota archaeon
LCYLTGKYTQDIELGIDAGYSAIGFSATTDKRELISGELILRKRISKLIEQKRNYRKGRRNKLWHRKLRFNNRSKPEGWFAPSIQHKLETHLRLIEKLKKILPITKITIEVAKFDQQKMNKTEIKGVEYRQGELQGYEVREYLLEKWKHKCAYCGKNNLPLEIEHIIPKIRGGTNRVSNLTIACHKCNQKKGDKTAAEFGYPEIQKKAKQTLKATAFMNIVRWRLVNTLECGWTYGYITKHDRIKLGLEKSHVNDAFVIAGGTTQSRSKLYMATQTRRNNRSIQTNRVGFKPSIRRQRYELQPNDLVKYKKILCKVKGGFSYGKWVRLVTKAGKIINTNVKKVELVKYGKGIQF

SEQ ID NO: 22675 - protein, 416 aa, unidentified
MVYVLGQDGHPLMPTCRHGKVKRMLKSGMAKVVKKCPFTIQLQYESTTHTQKINLGIDAGSKTIGVSATTETKVLYESEVALRNDIVELISGRRALRSSRRNRKTRYRKPRFDNRKRPDGWLAPSVRQKIETHITVVENVMKILPVTKIIVETASFDIQKIKNPEIEGVGYQHGEQLDFWNVREYVLFRDGHTCQCCKGKSKDNILNVHHIESRKTGGNAPNNLITLCETCHKAYHKGIITLPKEIHRGMRFRDAAFMGIMRWAFYDRLKELYTPFGVTVVNTYGYITKNTRIEYGLPKEHYVDARCISGNPAAKPLDHYYFQKKVRCHNRQIHKNTILKGGYRKRNQVEYEVKGFRLYDQVLWKGQKCFIFGRRSTGRMDLRLLDGTHVNASVGYKNLKLLSMRKNYLIEQRKAG

SEQ ID NO: 22676 - protein, 425 aa, Ktedonobacter sp.; identical to SEQ ID NO: 6721

SEQ ID NO: 22677 - protein, 396 aa, unidentified
VRRTPFTIKLTIATGETKQDVTLGVDAGARHVGISATTEKEEVFASEVKLRQDITGLLADRLAFRRARRNRKTRYRAPRFNNRVRSKHKGWLASSVENRIQAHMSRIDAVCRLLPVTKIVIETASFDIQKIRNPEVEGTGYQQGDQLGFWNVREYVLFRDGHVCQHCHGRSRDKILNVHHLESRKTGGDAPNNLITLCETCHKAYHAGKIKLKVKRGHSFRAEAFMGIMRWTLLDRMRKAHSGLPVENTYGYLTKNTRITLGLPKAHCVDAYCIAGNLKAVRRGVCLHQRQVRKHNRQIHKFTVLSKRLEDGTKIGYRKLNQSPYLVHGFRLFDKVRCLGQIGFIFGRRSSGYFDVRRLDGVKLSPSISWRKLTLLEKRSTYLTELRKQDGASSPV

SEQ ID NO: 22678 - protein, 431 aa, unidentified; identical to SEQ ID NO: 4133

SEQ ID NO: 22679 - protein, 396 aa, unidentified
LDKRKRPLGHCTTKRARQLIEKGRACVYRYYPFTIIIKDLDVRKIEVHHDYRIKPDPGAGYTGISIIEDDRVIAYFELQHRGSEIVDRLQTRRNSHRNRRSRETGYRRCKFPKNGVYETSREKGWLPPSQMSILNNVLNFVRRLEKLLGPCKISIELVKFDMQLLENLDIKGEDYQHVELYNYELKTYLLEKYQHTCQYCANETGDHRLEKEHMVPKSRGGSDSLKNLILACHTCNQKKADRTPEEWLDALKAKKNAGDMDKKRFECLEKVVEGKKVGQELRYAAWTNSMRWRLYNALRELSADGTVSVGTGGRTAYNRNKLGIPKAHHLDALCCTKDVPENGYRNAVQPCLVVKATGRGGRLLGTINDCGIITTKFYQRNKRVNGIQTGDIVQAV

SEQ ID NO: 22680 - protein, 435 aa, unidentified; identical to SEQ ID NO: 11554

SEQ ID NO: 22681 - protein, 428 aa, unidentified
MNKVFVLDTHQQPLAPCHPAKARKLLRAGQAAVYRAYPFTIILLRAVAEPVAPPLRLKIDPGSKVSGLAIVNDASGEIVWAAEVAHRGEPIRTALAQRASVRGNRRSRKTRYRPPRFLNRRRRAGWLPPSVASRVANVMTWVRRLCQLCPIQALALELARFDTQALQNPEISGVEYQQGELWGYEVKQYVLEKWGRQCAYCDATQVPLEVDHIVARDRGGSHRVSNLTLACVLCNQKKSNHDIRDFLAHDPARLARLLAQAKAPLKDAAVLNSTRWALYEALVATGLPLEVGTGGRTKWNRSTRGLPKTHWLDAACVGASTPEVLWTSGTLRPLQIRATGHGSRQMCAMDKHGFPRTRAKGAKRVQGFQTGDIVKAIVPTGKKQGTYVGRVAVRASGSFNIRTAGGLVEGISYRYCRLLHRVDGYSYS

SEQ ID NO: 22682 - protein, 426 aa, unidentified
MVFVLSSDEQPLDPCHEARARKLLKAGRAVVWRTYPFTLRLKDRTTAESEVHDHRLKIDPGSQTTGIAIVQEGTDRVVWAGELTHRGGQVRDALLARRAVRRSRRQRHTRYRTARFLNRRRKDGWLAPSLHHRILTTLTWVRRLRHLCPIAATSMELVRFDTQLMENAEISGATYQQGELAGYEVREYLLHKWGRTCAYCGKGNRPLQVEHLIPKMRGGSNRVSNLTIACGPCNQEKGNRTASEFGFAHLMAQAKAPLKDAAATNSVRWALWRSLSALGLPLEAGTGGRTKWNRTRLGWEKAHWRDAAAVGASTPETLRVAVGSVLLIVAKGHRSRQSCRTNKHGFPIRHVPRRKRWFGFRTGDLVRAVVPGGKHAGVHVGRVAIRVTGKFNIATAQGLKQGISYRHLRIVQRADGYAYGYRKESA

SEQ ID NO: 22683 - protein, 460 aa, unidentified
VQLRQSDAGQSFVLCCLSDNQKGRHNHMYVYVINKHGQPVMPCRPRMARVLLQKHKATVVKQVPFTIRLLYGSSGYKQPVSLGMDAGSRHIGIAATTEKKVLYAEELKPRNDVVKLLSVRRQNRRARRSRKIRYRQARFDNRVSSKPKGWIAPSVEVKIQEHISAVMRIQKMLPVSEIHVETAEFDTQRLKAMEEGKPVPVGTDYQKGEMYDQYNVRQYVLFRDGYRCQCCGKHGDGVKLHVHHKESRQTGGNAPNNLITLCEDCHKALHAGTVQLPDGRAKRGRSHRDAAFMGIMRKAMVSQLRDIVDIPVTETYGYITKYYRELYHVEKSHISDAIMISRNFKAEPDDTYYASKAVRHHNRQLHKNTILKGGVRKRNQAPHVVRGFRLFDLVRYESSVYYVFGRRKSGFMDIRTLDGRKINKGSISNKRLKFVSTSKGMLVERRMAIPLADKSASFLA

SEQ ID NO: 22684 - protein, 414 aa, unidentified
RGFARYKGLNTGKEKKAIVVRRTPFTIQLTIATGEAKQPVSLGVDAGYKHVGLSASTEKAELYASEIELRQDITDLLSARRELRRARRNRKTRYRAPRFDNRIHTKRKGWLAPSVENRINAHLSRIEAVLRLLPVTKITVETASFDMQLLKNPDISGKEYQEGEQLGFWNVREYVLFRDGHVCQHCHGRSKDPVLNVHHLESRRTGGDSPGNLITLCETCHKALHRGEITLKAKRGQSFRAEAFMGIMRWEVLNRLKASHPELEVNNTYGYRTKHARISNGIAKSHCADAFCIAGYLGAKRLGKFFFQKQTRRNNRQIHKLSILKHGLRKRNQAPFEIKGFRLFDKVASKGEEGFIFGRRSSGYFDVRKLDGTRISAGISYKKLHLLEKRQTYITEIRKEKALPPLPEGRGLRA

SEQ ID NO: 22685 - protein, 451 aa, unidentified
MSVAVISKTGERLMPTSEYRARKLLKSGKAIKYSYHPFTIQLTERKTGNIQPIELCMDTGYIHIGISVKSEKHEYLTEQIDTLTDERSRHDACRMYRRQRRNRKRYRQPRFNNRKKNKGWIAPSLEHKKNMHIQAISRINNVMPLTDITMEMGNFDTQVLKAKEEGNPLPQGADYQHGERYGIATLREAVFTSDDYKCQCCGRTIKDGAILHVHHIKYRSQDGTNSMSNLATVCDKCHTPKNHKPGGKLYGWKPKLPSFKGATFMTTIRWQLYNEAKALFPDIDIHITYGAATKERRRELNIDKSHINDAFVMGQFHPRHRIKAVLYKKKRRNNRCLEKFYDAKYIDSRDGKKRSGQELFNGRISRNHKKDSENLHQYRLQKVTAGKRAVRKQHYSIQPHDIIVYENRKRETTGCHCSGTRAMLLPDKKSVSIKKIKIYKYAGGYFKSAFN

SEQ ID NO: 22686 - protein, 418 aa, unidentified
MVTVQQSTHHLPFGRVFIRRNLFMVYVISQDGKPLMPCSDPIARLLLKQGKAKVKKREPFTIKLTYETTNYTQGLTLGVDTGSGTIGTAVSKDNGDIVYMSEVVVRNDITDKMTQRAKYRRNRRNRKTRYRKARWLNRASSIKKDRFSPTMQSKLHSHVREIEYIQSILPVTEMVFETGQFDMQLMKNPSLANPKVRPWGYQKGANYGFENTKAMVLNRDNYTCQCCKGKHKDSKLEVHHIVFRSQGGSDEESNLLTLCHTCHKDLHSGKINPKLSGKLKGNLKYATQMNSIRKQLFRFYPNAIETFGYVTKANRLHLGVDKEHYYDACTIATQGNAFNVKSNLYKKKCVSDGDFQKTKGIRSEQPIVTDKICGFRKFDKVRYFGNDYFIKGRMSTGYAILMDIDGNKIDFSTMPRGY

SEQ ID NO: 22687 - protein, 431 aa, unidentified
MPDKVYVISRLGHPLMPCSPAKARHLLDDKKAKVVKRMPFTIRLLYGSTKYIQPIILGVDAGSKTIGLSASTAKEEVFAAEVMPRNDVVENLSTRREFRRARRNRTTRYRKPRSDNRVRSNHERWLAPSVKVKIQEHITSIKRVCTILPISKVVIETAEFDLQLLKAIQEGKPIPEGEDYQKGEMYGSYNVCQYVLWRDNYTCICCGVRGTPKNPVRLHVHHFESRKYGGNAPDNHGTLCDDCHKKFHLGIITDVKLKTRRQQSTRDAAFMGIMRKALMWRLRTELFIPVAETKGYITKATREKLLVLPKSHTRDALAIAQGRHGFGIKEYAYVEPANHIYTVRPVRHHNRQLHKASILKGGIRKRNQASKYVFGFRLYDKVLYQGKACFVWGRRTSGTFLLRTIDGIKVKDGVSYRNLTLLERSSNYLIA

SEQ ID NO: 22688 - protein, 450 aa, Clostridium sp.; identical to SEQ ID NO: 10358

SEQ ID NO: 22689 - protein, 411 aa, unidentified
MVYVQDIDGKPMMPTTRHGKVRRLLKDNKAVVVNTCPFTIKLTYKTSDYKQEIVLGVDAGTKHVGLSATTKSKELYASEVILRSDVVDLLSTRRGLRRTRRSRLRYRKQRFNNRVKSKKDGWIAPSVRHKIDSHVRIISFVYSILPVSKLIIEVAQFDTQKIKNPEISGKEYQEGEQLGFWNVREYVLARDGHKCQHCKGESKDPILNIHHIESRKIGGDSPSNLITLCETCHKEFHKGNIKLKVSRGKSLRDAAVMGIMKWKLYEELRSRYDNVSMTFGYITKYNRINHGIEKSHVSDAFVISRNFNSCRLGYYYKRKLVRRHNRQIHKMKILKGGIRKRNQAPFKVFGFRLFDKVMFQGEEHFIYARRLSGQFNIRDINGENKKDVSCKKLKYVSHGLVSVKTNLFLSQ

SEQ ID NO: 22690 - protein, 477 aa, unidentified; identical to SEQ ID NO: 14838

SEQ ID NO: 22691 - protein, 412 aa, unidentified; identical to SEQ ID NO: 4932

SEQ ID NO: 22692 - protein, 417 aa, unidentified; identical to SEQ ID NO: 6596

SEQ ID NO: 22693 - protein, 421 aa, unidentified; identical to SEQ ID NO: 4757

SEQ ID NO: 22694 - protein, 416 aa, unidentified
MVYVLDKNGQPLMPTDRHRKVRLMLQSGQAKVIKRCPFTIQLNYDSGHQTQEISLGIDAGSKHIGVSATTKIKVLYEADVELRNDIVDLLSSRRELRRGRRNRKTRYRQAKFNNRRRGNGWLAPSIRQKIGTHLIVVENICKILPISRIMVETASFDIQKIKNPDIQGAEYQQGDQLEFWNVREYVLFRDGHTCQCCKGKSKDKILNVHHIESRKTGGNAPNNLITLCETCHTGYHKGTVQLPKAIKRGMRFKDAAFMGIMRWAFYEALKQQYEPVGTPVHNTYGYITKHTRIEHNLPKEHYVDARCISGNPDAFPNGEYYYQKKVRCHNRQMHKLTILKGGIRKQNQATYLVKGYRLFDKVSYQGKGYFVFGRRQSGFFDIRTLSGEKVNKGSLSCKKLKFIATRMYYLIERRAV

SEQ ID NO: 22695 - protein, 392 aa, unidentified
MAVFVLDKKKQPLMPCSEKRARLLLARGRAVVHKRYPFTIRLKDRVGGETQPLRLGIDPGSKTTGLALMREPDSQQRHVLCLFELIHRGFQIKKALQQRAAFRRRRRSANLRYRAPRFNNRTKPKGWLAPSLQHRVDTVMAWVNRLSRLAPVTAISQELVRFDTQKLDNPEISGVEYQQGTLLGYEVREYLLEKWGRECAYCGTGDTPLEIEHVVPRSRGGSNRVSNLTLSCHPCNQSKDALSLVDFFATDKGLKKRLKANGHTANARLERVQRQLKQPLRDASAVNATRWALFSALNATGLPVTVASGGRTKYNRQRLNIPKSHALDAACVGAFEKLHDWTVPTLTIKAMGRGSYQRTRLTKYGFPRGFLMRQKQVHGFQTGHGACDSTHR

SEQ ID NO: 22696 - protein, 470 aa, unidentified
MSVFVVGLNGCRLMPTSERKARLLLKQGKAFVGQKVPFTIRLNYKTGSTTQLGYLGIDTGSQHIGVSVVREDGTVLHKEEIGLRDSMSKRKLLEAKASLRRGRRYRKTRYRHPKWRPKTKRVYCEVPDRKGRHWQKKKITFTSKRPKGWLPPSLQSKTDHHIRWIKKLQDLLPEGYRLSIELGRFDPARMKNPEIHGDLYQKGPQYDYENVRAYVLDRDRYTCQICKKKGGKLHVHHILYRSHGATDDPQYMVTVCSDCHSAQNHLPGGILYQWMQEQKRFSRGLRDATFMNILRKRLIRAFPEAVFTYGNVTKVDREKLKLPKSHGNDATAIALVKTGITAVKDKESVICIQQVRRKKRSLHEETPRKGRKEPNRTAARNNKNTKAVTVTKRQNKKKVSMTGCLFDRVELNGKKGWISGFTGKSCYVKDADDQYLSTSPKYKQVSLSKLRILHHCGNWIIGAKKTLGKG

SEQ ID NO: 22697 - protein, 442 aa, unidentified; identical to SEQ ID NO: 2903

SEQ ID NO: 22698 - protein, 477 aa, Blautia sp.; identical to SEQ ID NO: 2707

SEQ ID NO: 22699 - protein, 769 aa, unidentified
  REGION 1..769: note = IscB polypeptide
VVVRPQGKLDHIPIPKPERGGITIRSENVLGIDFGPEHVGLALVRREPAGEQVLYAASITLRDLSPVMKERRALRRQRRSESWYRQPRVPQRGGGSARGAGAQEDEQAVEGVPEEEEDRSRARSAPEYRRAQGCNKPKRKCKYVDPKTGEVCGANTPRKEKVRDLLLWDICQHLPVEPEQRLAILSYVNQVNIVRPEVLACLALEERALLENHRALARASKSKPLPQLLCELKIKKQLQSQILAIASGDPERKAADLKGRMPFCRKHFLLHHEQTRIPKPSAWLPPSIRCRHADLERVCREEVAPRWPVHRIRLERAQFDLQAIQRDPQGRGKDWDPEEWQRGPCWGRRNIYSAKRHEQGNRCAYCGKNPKKENRLELEHVKPGGGNTWDNLVLACRKCNQRKGKADAPGAGLEFSVDPDTGVSLAPRGLGESVVARYMTQTDQGYRELVARLQQLFPDAQIEYRYGYQTDHIRKRWIGSAQFAETALSLGYKQSPPRPKKRRKQWTELAHLKRKPRRHSDPLKSHVMDAVAIASALELDSPPQLCPAEKIILRPSRRQLFDTNPLQRGSDDKFYQRVKICGTQGGLAFDKLKHVVDDSKRAILERVRDRLIEQAKVIEQPKGNKESPPSAFTPDAAQLIPFTSVRLAKRDASKTNTRRLKGGHWYKVAGGPNWATVVYRLGVREQVIVIRNPAVFPDDSAELPKGAQVLFSFRKGELVSFEQDGQTTRARITKNNSNGTLTVERLDDGREVTRSARCFRPVPLLAPNA

SEQ ID NO: 22700 - protein, 460 aa, unidentified; identical to SEQ ID NO: 3859

SEQ ID NO: 22701 - protein, 450 aa, Desulfobacter sp.
MKVFVLNKHGKPLMPTTPRKARLLLKEEKAKIVSHSPFTIRLLYGSSGYKQKVKLGIDAGYKTIGFSAVSQKDELVSGEVKLLENQSERIRDRAVYRRQRRNRKRYRPARFDNRKRKEGWLAPSIQHKLESHIRIVNLIKKIVPVTEIVIEVASFDIQAIKNPDIEKMQYQQGKQSGFWNLREYILHRDKHQCQSETCQQKKTQPKNQALAVHHIGYWKKDRTDRPENLITLCSKCHSPANHKQKGSLYGWEPTVAPFRGETFMSQVRWRLVNKLEHCRHTYGYQTKSKRIDLELEKTHYNDAFVIAGGQRQNRTEVLIFQEKRKNNRCLEKFYDAKFIDIGSGKKVGGADLPCGRVKRNKGHEKNGENLKKYRGKKVSKGRRQIRKQRYPIQPHDVVKYNGNFYRAVGIQNKGKYLKMSDGTDKIVKNIKDIEIVFHQKTLVLIDAISM

SEQ ID NO: 22702 - protein, 442 aa, unidentified
MVYVLNKDGQPLMPTNRHGKVRRLLKTKKARVIKRCPFTIQLLYDTANHTQNITLGVDAGSKHIGLSATTEDKVLFEADVELRNDISKLLEARYKFRRSRRNRKTRYRKKRFDNRISSKHKGWLAPSIEHKIQSHFAMVEKVHRILPVTKIVVETASFDMQLLKAQLEGKPIPQGTDYQNGELAGWNIREYIFHRDNYTCQWCKGKSKDPVLVTHHHAYWKGDHTNKPSSLITLCNTCNDSKYHKKEANRLWGWEPKITNSYKHAAFMGVMRWTFYNRLKEIYPNVSMTYGYITKNTRIENNLPKAHYVDARCISGHPEAKSNGEYFYYKKVRCHNRQLHKANTLKGGIRKRNQAEYIVKGFRLFDRVEYQNNEYFVFGRRASGFFDIRTLDGQKVNKGSISFKKLKLKETSRTYLIERRMADTGVSLAPLTTEVTSLRQTI

SEQ ID NO: 22703 - protein, 476 aa, unidentified
LEVVGTEGVSHPGLPGKYKHKGGQLMSVAVISKTGERLMPTSEYRARKLLKSGKAIKHSYHPFTIQLTERETGDIQPIELCMDTGYIHIGISVKSEKHEYLAEQIDTLTDERGRHDACRMYRRQRRSRKRYRQARFNNRKRDQGWIAPSLEHKKKIHIQAISRINNVMPITDITLEMGNFDTQVLKAKEEGKPLPKGADYQHGERYSIATLREAVFSRDSYKCQCCGRTIKDGAILHIHHIKYRSQGGTNSMSNLATVCDKCHTPKNHKPGGKLYNWKPKLSSFKGATFMTAIRWQLYNEVKALFPDIDIHITYGAATKERRRKLDIDKSHVNDAFVMGQFHPKHRIKAVLYKKKRRNNRCLEKFYDAKYIDSRDGKKRSGQELFNGRINRNHKKDSENLHQYRLQKVTAGKRTVRKQHYSIQPHDIIVYESRKRETTGCHCSGTRVMLLPDKKSVSIKKIKIYKYAGGYFKSAFN

SEQ ID NO: 22704 - protein, 420 aa, unidentified; identical to SEQ ID NO: 6836

SEQ ID NO: 22705 - protein, 423 aa, Arthrospira sp.; identical to SEQ ID NO: 7646

SEQ ID NO: 22706 - protein, 470 aa, unidentified; identical to SEQ ID NO: 2825

SEQ ID NO: 22707 - protein, 487 aa, unidentified
VQDVFAGIDSGRENIGSGVSNEDGDCLYLGELKTSNKSIKIKMTERTGFRRERRRHDRQSKQRKAKKDHTEIQNGNDDICRTTISCKSVQISYPAAEESVTHKIIRGKEGKFANRHRDEGWITPSARQLVQMHMNDLKSMCKILPINHVTLERVAFDFQKLENENIKTWEYGKGKLYGYDSPEEYIHDVQNGKCLVCGKPHIDYLHHIIPRSKGGSDKVSNIAGLCYDCHYGPMGVHNCQNTQDRLPELKSEANKQYKVSLLNSVMPVLIEEIDKFCKANSIMFSICEGHDTAKVRDMYDLQKDHCLDGFAISLVGRNVKSVDVMPDRIHQKQRYKKKSKNIIQKRNYREYYDDKKLVAINRHKGTDQKADSLEEYMNTYAETHTTDECKKHFDSLVVKPARRTYTFHKEWRICPFHIGDKVRYEKKNKIKGNTKVDTFICEGIYFSKDENKAKVEHNKTKSKKMKFCRAIESGCIPYIDYIKLALI

SEQ ID NO: 22708 - protein, 413 aa, unidentified; identical to SEQ ID NO: 15509

SEQ ID NO: 22709 - protein, 431 aa, unidentified
MPNKVYVINKHGRPLMPCSPAKARHLLDEGKAKIKKRTPFTIQLVYGSSGYTQEVILGVDAGSKTIGMSVSTTKEELLSAEVKPRNDVVDLQSTRREFRRARRNRKTRYRKPRFDNRVRSKHKGWLAPSVEVKIQEHITSIKRVCRILPVSKVVIETAEFDLQLLKAIADGKPVPQGEDYQKGEMYGHYNVRQYVLWRDDYTCQCCGAHATKKKEVWLHVHHLESRKTGGDAPGNLVTLCDSCHEKLHKGLIAEKDFKKRKRRSTRDATFMGIMRKTLMQRLCSELPIPVVETRGYITKATREKLLVLPKSHTNDALAIAQGKRGFNVGYLPGIIQTDKIYTIRPVRHHNRQLHKAAILKGGIRKSNQVGKYVFGYRLFDKVQFNEQDCFIWGRRTTGIFTIKTINGKMIKDGISFKKLKLVEKSTSYLIA

SEQ ID NO: 22710 - protein, 448 aa, unidentified
MSVYVINQRKQLLMPTTEQKARLLIKQGKAKVIKIKPFIIQLLYATGETKQPITLGIDSGYNNIGFSAITDKKELIVGELKLLQNIKERLLERAMYRRQRRSRLRYRKPRWNNRIKSKQKGWLAPSLQHKLNSHIKFIDSLYKILPITKCIVEIANFDIQKIKNPNIKGIEYQQGEQSGFYNLREYILHRDDHKCQNPNCKNKDKEKILEIHHIKYKSFGGTNNPNNLITLCTKCHTSPNHKKGKFLYNWYMEGKKVRGFKDATFMSTIRWCLVNQLKEKYNNVSFTYGYITKNHRIENKIEKSHYNDAFCIAKGINQIRNNKIWQLQQCRRNNRSLEKFYDAKYIDTRTGHKVSGSELNCGRRTRNKNKNSENLRVYRGQKLSKGQRRIRKQKYFYQPNDLIKYEEKIYTVKGTQNGGKYVALKEIKKVPRIELIKPYKFQKGIVWN

SEQ ID NO: 22711 - protein, 431 aa, unidentified; identical to SEQ ID NO: 8901

SEQ ID NO: 22712 - protein, 325 aa, unidentified
MYCAVMPITHATVEVGSFDTMLVKAIQEGKAIPEGADYQKGPRYNLATLREAVFYRDNYTCQVCGRKVADGAILHMHHMFYWKGRHGDSLNELLTVCEKCHTPANHQKGGKLYGFGENVKFADLSGAAFMNTVRWQIVNELYAAFGKDFVTVTYGAMTKEKRIALRLEKSHNNDAYAMGEFHPNCRCTFEHYEKVRRNNRILEKFYDSRYIDIRTGEIATGKELFNGRINRNHKKDSENLHRYRGKRTYAGHRALLRKKVNLNPGDLVSLNGEVLVVHSTHTNKKGAVNVEFKTPGKSGQKSASLKKLKIVKAADSMHSAWEKIS

SEQ ID NO: 22713 - protein, 418 aa, unidentified; identical to SEQ ID NO: 4327

SEQ ID NO: 22714 - protein, 416 aa, unidentified; identical to SEQ ID NO: 16735

SEQ ID NO: 22715 - protein, 448 aa, unidentified
MSTGLRAVQAEPAGIRKGDALKVFVLNMRGRPLMPCSPARARHLLKAGKAVVRRRTPFTIQLRIATGETKQSVTLGVDAGAKHVGLSAATEKEEVFASEVELRQDITGLLAARLSLRRDRRHRKTRYRAPRFLNRVRSKHKGWLAPSVENRIQAHMSRIDAVCRLLPVTKIVIETASFDVQKIRNPEVEGTGYQQGDQLGFWNVREYVLFRDGHVCQHCHGHSKDKILNVHHLESRQTGGDAPNNLITLCETCHKACHAGKIKLKVKRGQSFRAEAFMGIMRWTLLDRVRKAHPGLPVENTYGYLTKNTRITLGLPKAHCVDAYCIAGNLKAVRRGVYLHQRQVRKHNRQIHKCTVLSKTLKDGTKIGYRKLNQTPHLVKNFRLFDKVRCLGQTGFIFGRRSSGYFDVRRLDGVKLSSGISYRKLTLLEKRSTYLTELRKEDGASSPV

SEQ ID NO: 22716 - protein, 421 aa, unidentified
MQYVYVLNKHGKPLMPCSPGKARLLLKEGKARVVKRTPFVIKLLHGSAGYKQPVALGVDAGSRHVGLSACTEGRELYKEELSPRNDVVELLSVRRQYRRSRRNRKTRYRAPRFNNRVHSKHKGWLAPSVEVKIQEHITVIKRVCRILPIVLVRVETAEFDTQRLKAMLEGKPLPVGSDYQLGEMYDEYNVRQYVLKRDNYTCQCCGAHPAEKKPVRLHVHHIESRHVGGNAPNNLITLCAVCHKALHEGKITLGNGKKRGKPLRDAAFMGIMRNTLLARLKDELNIPVKQTYGYITKLLREENHVEKSHTNDARCIAKAPNAKPCDTMFRTRALRHHNRQIHKAKILKGGTRKKNQAPYLVKGFRLWDKVRYNGEECFITGRRTSGYFAIKKYDGTVISNSASYKKLTLLEAATNYITERS

SEQ ID NO: 22717 - protein, 498 aa, unidentified
MDGDPQMPIKRKRHVEQLLQTGRARVFRQVPFTIQLTYKNEPVLQPVTIAEDPGRSNIGMAVVSLSGELLSAAVVQTRNKEIVKLMDKRKQHRRASRNGERKARQRLAKKCHTMVKAGSLMRKLPMYGKDKRVRCNVIKNTEARFCNRKREDGWLTPSAEHLVRTQINLIHKMQKFLPITDVAIEINRFAFLSLEDPSISGVDFQNGPLKGYDDLNAAVEDLQDGHCLMCNSPIEHRHHIVPRSMQGSNSIGNIAGLCCKCHERVHKDSAFEDSLKKKKAGLNKRDAAVSVLNQAIPFICKRLEQEFRKEHVHYCSGRDTSMVRRSLGYHKTKEEQLHEVDAWCIAVLSLQQIPEKAPSFDHVHEILQFRRQDRSRIKAQTSRAYYHERKKIAKNRKKAEGQREDSLQEWRKRQVERYGEEQTRKMISQLKVKKSIRRYKRLDRLMPGAVFYYQGVRYVMRGQHCEGTYLQAVGMGSKDFPAKKCKIVAHNEGLVFVS

SEQ ID NO: 22718 - protein, 309 aa, Methanosarcina sp.
VVSRIPFTIKLTYNSKGYTQPVVAGMDSGSKKIGCAAVGNGKVLYQSEAEIRQDVSAKMKQRAMYRRTRRSRKTRYRPARFDNRRNSLREGRIPPSIRSKLESHFREKKFVESILPVTKWGVELASFDIHKITDPSVSGIEHQNGDQKGFYNLKAYILNRDKHTCQHCKGKSKDPKLHCHHIIFRSQKGTDTPKNLICLCNTCHDALHRGEFQLSVKRSKTKHATEIGIIKSQIKKSDWNFIETFGYETKYKREQMLELPKTHYFDAVSICCNDQKVELEDIFYLKKNMLVKEIISREREKIRKEDSNW

SEQ ID NO: 22719 - protein, 284 aa, unidentified; identical to SEQ ID NO: 3117

SEQ ID NO: 22720 - protein, 424 aa, Succinivibrio sp.; identical to SEQ ID NO: 6253

SEQ ID NO: 22721 - protein, 432 aa, unidentified; identical to SEQ ID NO: 7963

SEQ ID NO: 22722 - protein, 423 aa, Clostridium sp.; identical to SEQ ID NO: 5342

SEQ ID NO: 22723 - protein, 423 aa, unidentified; identical to SEQ ID NO: 3951

SEQ ID NO: 22724 - protein, 470 aa, unidentified; identical to SEQ ID NO: 2949

SEQ ID NO: 22725 - protein, 465 aa, unidentified; identical to SEQ ID NO: 6446

SEQ ID NO: 22726 - protein, 517 aa, Leptospirillum sp.
MLPQSRALEAADADNREGQDETVGGKGAIPKPVANISEGRRFARSALRPQGQCNVRFDGGFVQVFVLDKKKKPLMPCHPARARELLREGRAVVHRIAPFTIRLKDRIGGETQPIRVKLDPGSKTTGLAVVREEETDGEKTAHVLFQAEIHHRGSAIKKKLDQRRAFRRRRRSQLRYRTPRFDNRTRPDGWLPPSLRHRVDTTLAWVERLRRLVPVSELSQELVRFDMQKIENPEISGVEYQQGTLAGYEVREYLLEKWGRTCAYCGSENVPLEIDHIHPRSLGGSDRVSNLTLACRSCNLKKGNRPVGEFLAKTPERLSTILARAKAPLKDAAAVNTTRWALFQALKATGLPVETASGGRTKYNRTRLGIPKGHSLDAACVGKVDRIEGWNRPCLSIKSTGRGSYQRTRLDAFGFPRGSLTRTKAHFGFQTGDRVRAIVTKGKKTGTYAGRVAVRSSGSFNIQTGSGVVQGISCKDCRLLQRADGYGYSIHPIIEKGEAGEALPLPGMNAGVSRARG

SEQ ID NO: 22727 - protein, 415 aa, unidentified; identical to SEQ ID NO: 3635

SEQ ID NO: 22728 - protein, 485 aa, unidentified
DVFAGIDSGRENIGSGASNEDGDCLYLGELRTSNKSIKMKMTERVGFRRERRKHDRQNKQRKARKDHTEIQNGKDDICRATISCKSVQISYPTAEESVTHKIIRGKEGKFANRHRDGDWITPSARQLVQMHMNDLKSICKILPISHVTLERVAFDFQKLENENIKAWEYGKGKLYGYDSPEEYIHDVQDGKCLVCGKPHIDYLHHIIPRSKGGSDKVSNIAGLCYDCHYGPIGVHNCQDTQDRLPELKNEVNKQYKVSLLNSVMPVLIEEIDKFCKANSIMFSICEGHDTAKVRDMYDLQKDHCLDGFAISLVGRNVKSVDVMPDRIHQKQRYKKKSKNIIQKRNYREYYDDKKLVAINRHKGTDQKADSLEEYMNTYAETHTADECKNHFESLTVKPARRTYTFHKEGRICPFHIGDKVRYEKKNKIKGNTKVDTFICECIYFSKDENKAKVEHNKTKSKKMKFCRAIESGCIPYIDYIKLALI

SEQ ID NO: 22729 - protein, 520 aa, unidentified; identical to SEQ ID NO: 22462

SEQ ID NO: 22730 - protein, 400 aa, unidentified
EICEDVGYNYIGISVKSESHEYVSAQYDTLQDEKEHHDDCRRTRRTRRNRLRYRKPRFDNRKRNKDWLAPSLEHKKQLNISLIERYVSVIPITHATVEVGSFDTMLLQAIQKGEAKPESADYQKGPRYNLATLREAVFYRDNYTCQVCKRKIADGAILHMHHMFYWKGRHGYQLDELVAVCEKCHTPANHQKGGKLYGFGKDKKFANLSGAAFMNAVRWQIVDALHATYGKEFVTITYGAMTKEKRIILGIEKTHNNDAYAMGDYHPAHRCVFRHYQKRRRNNRVLEKFYDATYIDARTGNKAKGKELFNGRINRNHKKDSENFHKYRSKKVSKGRCSIRRQRYAIQPYDTVRLEGKTYITSGCHNKGTRLLIPVNGKSKSVAISKVQVVCHAGAWIQII

SEQ ID NO: 22731 - protein, 408 aa, unidentified; identical to SEQ ID NO: 3192

SEQ ID NO: 22732 - protein, 414 aa, unidentified
MPCSPAKARLLLKEKKAIVKRRTPFTIQLTIATGETKQPVGLGVDAGYKHVGLSASTDKAELYASQVELRQDITDLLSARRALRQSRRNRKTRYRAPRFDNRIRTKRKGWLAPSVENRINAHLSRIEAVLRLLPITKITVETASFDMQRLKNPDISGKEYQEGEQLGFWNVREYVLFRDGHVCRHCHGRSKDPVLNVHHLESRRTGSDSPDNLITLCETCHKALHRGEITLKAKRGQSFRAQAFMGIMRREVLNRLKASYPELKVHETYGYLTKHARIANGIVKSHGADAFCIAGNLGAERLGEFFFQKQTRRNNRQIHKLSILKGGIRKRNQAPFEAKGFRLFDKVACQGEEGFIFGRRSSGSFDVRKLDGTRISAGISCKKLRLLEKRRTYLTEIRKEEALPPLPEGRGLRA

SEQ ID NO: 22733 - protein, 451 aa, Blautia sp.
MSVAVISKTGEKLMPTSEYRARKLLKSGKAIKHSYRPFTIQLTEMETGDVQPIELCMDTGYIHIEISVKSEKHEYLAEQIDTLTDERTRHDACRMYRTQRRGRKRYRHTRFNNRKRDKGWIAPSLEHKKNIHIQAISRISKVMPVTDITMEMGNFDTQVLKAKEEGKPLPQGTDYQHGERYGIATLREAVFARDGYKCQCCGRTIKDGAILHVHHVKYRSHGGTNSMSNLATVCDKCHTPKNHKPGGKLYNWKPKLPSFKGATFMTTIRWQLYNEVKALFPDIDIHITYGAMTKRRRRELDIDKSHVNDAFAMGCFHPKHRVKAVLYKKKRRNNRCIESFYDAKYIDSRDGKKRSGQELFNGRINRNHKKDSENLHKYRLQKITDGKRTVRKQHYNIQPHDIIVYESRKHETAGCHCNGARVMILPDKKSVSIKKIKIYKYAGGYFKSAFN

SEQ ID NO: 22734 - protein, 411 aa, Orenia sp.; identical to SEQ ID NO: 7492

SEQ ID NO: 22735 - protein, 414 aa, Clostridium sp.; identical to SEQ ID NO: 8775

SEQ ID NO: 22736 - protein, 451 aa, unidentified; identical to SEQ ID NO: 2390

SEQ ID NO: 22737 - protein, 442 aa, unidentified
MSTSVFVLDKKHRPLMPCRPARARRLLRAGRARVVKRFPFVIRLVDRTVEQSEVQPVLIKLDPGSRETGAAVVRDDGKKRHHALAFFVIEHRGGAIRDALKARSAFRRRRRSQNFRCRSPRFLNRVKPKGWLPPSLRHRVETTLSFVRRMCRYLPVSGIAAELVKFDSQKLQTPEVSGIEYQQGTLFEYEVREYLLEKFGRKCVYCGAEGVPLNIDHVVPRAKGGSNRVSNLVLACVSCNQKKGARSLEDFLKGKPEVLARVRRELKTPLRDAAAVNATRWVLFNELKATGLPVETGSGALTKFNRHAFGVEKEHWLDALCVGRLNGVVTRKGLNVLEIRCMGRGSRQRTRLTKYGFPRGYLMRQKCVHGFATGDMVEANVPKGKKAGLWRGRVAVRVSGSFNIQTPKGVIQGVGWKHCRLISHNDGYGYAWLGHAPHSSPA

SEQ ID NO: 22738 - protein, 286 aa, unidentified
VLRLLPITKITVETASFDMQRLKNPDISGKEYQEGEQLGFWNVREYVLFRDGHVCRHCHGRSKDPVLNVHHLESRRTGSDSPDNLITLCETCHKALHRGEITLKAKRGQSFRAQAFMGIMRREVLNRLKASYPELKVHETYGYLTKHARIANGIVKSHGADAFCIAGNLGAERLGEFFFQKQTRRNNRQIHKLSILKGGIRKRNQAPFEAKGFRLFDKVACQGEEGFIFGRRSSGSFDVRKLDGTRISAGISCKKLRLLEKRRTYLTEIRKEEALPPLPEGRGLRA

SEQ ID NO: 22739 - protein, 426 aa, unidentified; identical to SEQ ID NO: 19271

SEQ ID NO: 22740 - protein, 433 aa, Alishewanella sp.
LEKPSNNTVEAHITHFGGERRVTVIILEIGYVSVLVLDNQKQPLMPCHSARARQLLRDGKAAVFRRYPFTIILKDRVGGDTQPLSLNVDPGSKTTGVALVAHYLRGRCAVWALHIGHRGQQIKSALDGRRGIRRSRRNRKTRYRAPRFLNRTRPKGWLAPSIMSRVHNVDTWAKRLMRFVPITSANVETVRFDMQLMENPSMAGMDYQQGSLFGWELREYLLYRHKHTCAYCDGLTGDVVLEKEHIVPRALGGSNRLANHVISCRTCNEDKGSLHPNAWAQLCTQRCGKLNTARAKNMQRIQAGYRPSFKDAAAVNATRYAVGGVIKCLLTDTQFWSGGRTKKNRSDQGYAKDHWIDAACVGEKGGAVSLLCDAVLVANAKGHGSRQMCRVDKYGFPRTSAKTRSVINGFKTGDMVTASVPTGKKQGVHVGRV

SEQ ID NO: 22741 - protein, 431 aa, unidentified; identical to SEQ ID NO: 5232

SEQ ID NO: 22742 - protein, 415 aa, unidentified
MENRIEYCFVIDKNNRPLAPTKVNKGWYLVRKGRAKLKSKYPMMIQLEKEVESDEDNESHMVCGIDDGSAHVGLAIVQKCPTKNKVVFKGTIEQRQDIKHLMGVRRGYRRYHRYHKRYRQARFTNRYSSKRSGRLAPSIKQKKDAVLRVLYQLNKWLNIQEYYLEDVCIDIRAMTDDYNPYKWQYQKSNRLDENLRKAAINRDGCKCQECGKSNCVLEVHHIRARKYGGADTIGNLITLCSGCHQKTEGREREFEDRYFKIIGSKPKRFDYAMHVMQGKNYLRGKISELGLLHLTNGGETANKRIDWNIEKSHSNDAICVTDCIPDTCDVKEWIIRPMRRKSKAKTDNVLGIRHRDLVSYTPRGKSSVVGYVTALYPDSYQISMTSRNKQYKKISARSCVLKWRFNKIYWLEQCV

SEQ ID NO: 22743 - protein, 424 aa, unidentified; identical to SEQ ID NO: 6292

SEQ ID NO: 22744 - protein, 456 aa, unidentified; identical to SEQ ID NO: 13209

SEQ ID NO: 22745 - protein, 509 aa, unidentified; identical to SEQ ID NO: 5057

SEQ ID NO: 22746 - protein, 431 aa, unidentified
MPDKVYVISRLGHPLMPCSPAKARHLLDDKKAKVVKRMPFTIRLLYGSTKYIQPIILGVDAGSKTIGLSASTAKEEVFAAEVMPRNDVVENLSTRREFRRARRNRTTRYRKPRSDNRVRSNHERWLAPSVKVKIQEHITSIKRVCTILPISKVVIETAEFDLQLLKAIQEGKPIPEGEDYQKGEMYGSYNVCQYVLWRDNYTCICCGVRGMPKNPVRLHVHHFESCKYGGNAPDNHGTLCDDCHKKFHLGIITDVKLKTRRRQSTRDAAFMGIMRKTLMWRLRTELFIPVAETKGYITKATREKLLVLPKSHTRDALAIAQGRHGFGIKEYAYVEPANHIYTVRPVRHHNRQLHKASILKGGIRKRNQASKYVFGFRLYDKVLYQGKACFVWGRRTSGTFFLRTIDGIKVKDGVSYRNLTLLERSSNYLIA

SEQ ID NO: 22747 - protein, 515 aa, unidentified
MTALEEKLSKTEYIYVLGFDGKPQMPTRRKRHVLKLLKTGRARIAEDIPFTIRLTYRNAPVLQPVTLAEDPGRTNIGGAVLSPLGDLLFAAVIETRNKEIKKLMADRQKSRQASRRGERKARQRLAKRYGSMVKSGMVMRKLPMYAADKFVTCKFIRNTQARFCNRKRCPDWITPTVQHLVQTHLNIIRKISRYLPVTDIAFEVNRFAFMHMENPKAMGVDFQNGPLKGYDDVKEAICTQQHGKCLMCKKPISHFHHIVPRSRGGSDTIQNLAGLCPECHTKVHTDTTFRKDFDRKKSGQLKKYGALSALNQAVPFICKKLLEEYGEEHVHFCGGLDTSLIRTALGFEKTKKNQMHEVDAYCIGLAALEINEVETPAFDHTFQIRQFRRQDRSIIHHQTGRSYYQGKEKVAQNRKPGFEQKTTALSQWYEEQVRIHGEKEAEKLRSQLRVEKSCRHYNDMDRFLPGAVFLYEGKRYVLSGRITNGKYLRACGQGMKNFPAAECTFIRHNAGLVFI

SEQ ID NO: 22748 - protein, 475 aa, unidentified; identical to SEQ ID NO: 15647

SEQ ID NO: 22749 - protein, 465 aa, unidentified; identical to SEQ ID NO: 3070

SEQ ID NO: 22750 - protein, 453 aa, unidentified; identical to SEQ ID NO: 5967

SEQ ID NO: 22751 - protein, 416 aa, unidentified
MVYVLDKNGQPLMPTDRHRKVRLMLQSGQAKVIKRCPFTIQLTYNTGHQAQEISLGIDAGSKHIGVSATTKTRVLYEADVELRNDIVDLLSSRRELRRGRRNRKTRYRPARFDNRRREDGWLAPSIRQKIGTHLTVVENICKILPISRITVETASFDIQKIKNPDIQGAEYQQGDQLGFWNNREYVLFRDNHTCQCCKGKSKDKILNVHHIESRKTGGNAPNNLITLCEICHTGYHKGAVQLPKTVKRGMRFKDAAFMGIMRWAFYEALKQQYEPVGTPVHNTYGYITKHTRIEHNLPKEHYVDARCISGNPDAFPSGEYYYQKKVRCHNRQIHKLTILKGGIRKQNQATYLVKGYRLFDKVSYQGKGYFVFGRRQSGFFDIRTLSGEKVNKGSLSCKKLKFIATRTYYLTERRAV

SEQ ID NO: 22752 - protein, 447 aa, unidentified; identical to SEQ ID NO: 5309

SEQ ID NO: 22753 - protein, 418 aa, unidentified; identical to SEQ ID NO: 8891

SEQ ID NO: 22754 - protein, 442 aa, unidentified
VRHLLKDGKAKIIKHHPFTIQLLYDSKTNTQPIEICEDVGYNYIGISVKSQSHEYVSAQYDTLQDEKACHDSCRKLRRSRRNRLRYRKSRFDNRKRGEGWLAPSLRHKKELNVNVVKMYCAVMPITHVTIEVGSFDTMLLKAVQEGKAIPEGADYQKGPRYNLATLREAVFYRDNYVCKVCGRKATEGAILHMHHMFYWKGRHSNSLDELLTVCEKCHTPANHQKSGKLYGFGENVKFADLSGAAFMNTVRWQIVNELYAAFGKDFVTITYGAMTKEKRIALRLEKSHNNDAYAMGEFHPNHRCTFEHYEKVRRNNRTLEKFYDSRYIDIRTGEIATGKELFNGRINRNHKKDSENLHRYRGKRTYAGHRALLRKKVKLNPGDLVSLNGEVLIVHGTHTNKKGAVNVELKVPAKNGQKSASLKKLKIVKTTDSMHSAWEKIS

SEQ ID NO: 22755 - protein, 414 aa, unidentified; identical to SEQ ID NO: 2588

SEQ ID NO: 22756 - protein, 414 aa, Selenomonas sp.
MPTIKKYAFVLDAEGKRLDPTIEQNAWRLIRQHKARLVSKFPMVIQLNKVVDNPNNDEIRCGIDDGANHVGLALVQKCLTKNKVVFKGTIEQRKDVKHLLTVRRGYRRYHRYHKQYRPARFFNRASSRRSGRLMPSIIQRKQAMLRVIDRLRQWIRIDGYWLEDVKIDIRALTDGYKPYRWQYQRSNRLDNNLRLAAIYRDGCKCMECGKVKTRFEVHHITPREAGGTDTISNLITLCPNCHARTFSRESQFADRYYALIGSAGHVEGLDDAQRVMQGKHWFRGQLQLRGSLVLTTGGDTANKREDWNISKNHANDAVCITDLKPENIGVGEWSIKPMRRKSKAGVDEVCGFRHRDYVTYTYRNGETHTGYVTAMYPDKNQLNFQSSTKHCKRVNALKTRLLWRFNKIYWLKCA

SEQ ID NO: 22757 - protein, 428 aa, unidentified
LKVFVLNMRGRPLMPCSPARARHLLKAGKAVVRRRTPFTIQLRIATGETKQSVTLGVDAGAKHVGLSAATEKEEVFASEVELRQDITGLLAARLSLRRDRRHRKTRYRAPRFLNRVRSKHKGWLAPSVENRIQAHMSRIDAVCRLLPVTKIVIETASFDIQKIKNTTVEGTDYQQGDQLGFWNVREYVLFRDGHVCQHCHGHSKDKILNVHHLESRQTGGDAPNNLITLCETCHKACHAGKIKLKVKRGQSFRAEAFMGIMRWTLLDRVRKAHPGLPVENTYGYLTKNTRITLGLPKTHCVDAYCIAGNLKAVRRGVYLHQRQMRKHNRQIHKCTILLQTLEDGTKIGYRKLNQTPHMVKNFRLFDKVRCLGQTGFIFGRRSSGYFDVRRLDGVKLSPSISWRKLTLLEKRSTYLTELRKEDGASSPV

SEQ ID NO: 22758 - protein, 533 aa, unidentified; identical to SEQ ID NO: 18428

SEQ ID NO: 22759 - protein, 493 aa, unidentified; identical to SEQ ID NO: 3781

SEQ ID NO: 22760 - protein, 421 aa, unidentified; identical to SEQ ID NO: 7313

SEQ ID NO: 22761 - protein, 431 aa, unidentified
MPNKVYVINKHGRPLMPCSPAKARHLLDAGKAKVKKRTPFTIQLVYGSSGYTQEVILGVDAGSKTIGMSASTTKEELLSAEVKPRNDVVDLLSTRREFRRARRNRKTRYRKPRFDNRVRSKHKGWLAPSVEVKIQEHITSIKRVCRILPVSKVVIETAEFDLQLLKAIEEGKPVPQGEDYQQGEMYGHYNVRQYVLWRDGYTCQCCGAHATKKKEVRLHVHHLESRKVGGDAPDNQVTLCESCHEKLHKGLIAEKDFKKRKRKSTRDATFMGIMRKTLMQRLCSELPIPVIETRGYITKATREKLLVLPKSHTNDALAIAQGKQGFNVGYLPGIVQINKIYTIRPVRHHNRQLHKATILKGGIRKSNQTEKYVFGYRLFDKVQFNGQDCFIWGRRTTGIFTIKTINGKMIKDGISFKKLKPVEKSTGYLIA

SEQ ID NO: 22762 - protein, 472 aa, unidentified
VVDNRLLSIKPLINIGEGVIYSSICTGLSLQTYQKRKEVPCMVYVLDINGQPLMPTTRHGKVRRLLNSHLAKVVKRCPFTIQLLYQSTKEIQPVSLGVDAGSKHIGMAATTEKKVVYQEELSPRNDVVKLLSLRRASRSSRRSRKTRYRKPKFNNRVHSKHKGWLAPSVEVKIQEHITAIKRICQILPISEIQVETAEFDFQRLKAMKEWKPLPVGTDYQLGEQYDFYNTRQYVLHRDGYTCQCCGTHDNNIKLHVHHIESRQTGGDAPSNLITLCEHCHKALHKGKLELPKGKKRGKTYRDATFMGIMRKTLLERLRKEVDVPVSGTYGYITKYLREKTDLEKSHINDAICISKYPYAKPLDTYYLTKVVRNHNRQIHKSNFSKGGIRKRNQAPYLIKGFRLFDKVLYQGKEYFIFGRRATGYFDIRTLDGTKVNEGSISYKKLRIQDTAKAYLKEARAIPHMNKFTCVLA

SEQ ID NO: 22763 - protein, 236 aa, unidentified
MVYVQDINGKPLMPTTRHGKVRRLLKDKKAVVVNLCPFTIKLMYVTSDYKQEIVLGVDAGTKHVGLSATTKSKELYSSEVILRNDIVDLLSTRRELRRARRNRLRYRKPRFNNRIKSKRPGWIAPSVKYKIDAHIRVVENVCSILPISRIVIEVAQFDTQKIKNPNISGKEYQEGDQLGFWNTREYVLARDGHKCQYCKGKSKDKILNVHHIESRKTGGDSPSNLITLCETCHKEY

SEQ ID NO: 22764 - protein, 536 aa, unidentified
LYIKMTSCTCTVFPAYNYAKASSSQGKHNLLLRQERLIVKEVTYMSTVYVLNKDGKPLMPTTRGGHVRHLLKEQKARVVRTNPFTIQLLYETDNLVQPLYLGIDPGRTNIGVAVVKTDGTAVFTAHLETRNKEIPKLMQGRKKARRARRTNGRRCRRQRRAKANGTISKKCVKQATAQNGSVSKRANEIGVIKRHLPGCEKEVLCIGIKNKEAKFSNRTRPEGWLTPTANQLLQTHINLVKKIQKFLPISDVVLEINKFAFMRLDNPNVQKWQYQQGPLYQKASLEEAVSEMQEHHCLFCKKPIDHYHHVVPQHKNGSNTISNIVGLCTKHHDLVHKEAVWQEKLAKKKTGLNKKYGALSVLNQIIPALTKELSSLFPKHFFVTNGKSTYDYRAAHGVSKDHWLDAYCIACSVLPNDTCDKTINSRVPYELKQFRRHDRRALNNENMSRVYTFNGKMVATNRHKATEQTTDSLEEFRQRQPNDVCNLKVKEHHPTYRNMNRNYPGSVFLVGNQVHVMQGIAGSKDGEATTYKDTNA

SEQ ID NO: 22765 - protein, 429 aa, Symploca sp.
MRVFVVNQDKKPLNTCHPAKARKLLSLGRAAVWRHYPFTIILKGKERPIVTTEHRIKIDPGSKTTGLAILNGNRVVFAANLIHHGDTIRKTISERRAVRRNRRHRQTRYRKCRFNRSQPKGWLAPSLMSRVNNILSWVKRLVAICPIRAISQELVRFDTQKLQNPEISGVEYQQGELWGYEVKEYLLEKWGRQCVYCGATDTQLEVEHIHPRSKGGSNRLSNLTIACRDCNLNKSNSKIKNFLSGKPDLLQRILKIAKVPLKDAAAVNATRWELYRQLQSLELPVEVGTGGRTKYNRTRLGLPKTHYWDAASVGESTPKNLRAAKVKPLTIKAMGRGNRQICTTNKHGFPIRHRTRCKTFYGFRTGDMVRAILPQGKFAGTHIGRLTVRKSGVFEMNTPKGKITPVRHKYCQLIQRNDGYMYSFVVDVQ

SEQ ID NO: 22766 - protein, 443 aa, Anoxybacillus sp.; identical to SEQ ID NO: 8762

SEQ ID NO: 22767 - protein, 421 aa, unidentified
MQYVYVLNKHGEPLMPCSPGKARLLLKQQKACVVKRTPFTIKLLYGSAGYKQPITLGVDAGSKHVGLSASTEKRELYREEFTPRNDVVDLLSTRRQNRRSRRNRKTRYRAPRFDNRVHSKHKGWLAPSVEVKIQEHITVIKRICRILPITLVRVETAEFDTQRLKAMLKGKSLPVGTDYQLGEMYDEYNVRQYVLKRDNYTCQCCGAHPTEKKPVRLHVHHLESRHVGGNAPNNLITLCVACHKALHEGKITLDKGKKRSKPLRDAAFMGIMRNTLLARLKDELNIPVKQTYGYITKLLREKNKIPKSHVNDARCIAKAPNAKPCDTMLYTRALRHHNRQIHKAKILNGGIRKKNQAPYLVKGFRLWDKVRYNGEECFITGRRSSGYFALKKYDGTVISNSASYKKLMLLEAATNYITERS

SEQ ID NO: 22768 - protein, 242 aa, unidentified; identical to SEQ ID NO: 15640

SEQ ID NO: 22769 - protein, 396 aa, unidentified
VVRRTPFTIQLTIATGESKQPVSLGVDAGYKHVGLSASTEKAELYASQVELRQDITDLLSARRALRQSRRNRKTRYRAPRFDNRIRTKRKGWLAPSVENRINAHLSRIEAVLRLLPITKITVETASFDMQRLKNPDISGKEYQEGEQLGFWNVREYVLFRDGHVCRHCHGRSKDPVLNVHHLESRRTGSDSPDNLITLCETCHKALHRGEITLKAKRGQSFRAQAFMGIMRREVLNRLKASYPELKVHETYGYLTKHARIANGIVKSHGADAFCIAGNLGAERLGEFFFQKQTRRNNRQIHKLSILKGGIRKRNQAPFEAKGFRLFDKVACQGEEGFIFGRRSSGSFDVRKLDGTRISAGISCKKLRLLEKRRTYLTEIRKEEALPPLPEGRGLRA

SEQ ID NO: 22770 - protein, 419 aa, unidentified; identical to SEQ ID NO: 4877

SEQ ID NO: 22771 - protein, 451 aa, Erysipelotrichaceae sp.; identical to SEQ ID NO: 5369

SEQ ID NO: 22772 - protein, 521 aa, unidentified
MRDYMTQKRKEASRMSEYIYVLGMDGDPQMPTKRKRHVEKMLQTGRARVFRQVPFTIQLTYKNQPVLQPVTIAEDPGRSNIGMAVVSLSGELLSAAVVQTRNKEIVKLMEKRKQHRRASRNGERKARQRLAKKCHTMIKAGFLMRKLPMYGKDKRVQCNVIRNTEARFCNRKREDGWLTPSAEHLVRTHINLIHKMQKFLPITDVAIEINRFAFLSLEDPSISGVDFQNGPLKGYDDLNAAVEDLQDGHCLMCNSPIEHRHHIVPRSMQGSNTIGNIAGLCCKCHERIHKDARFEDHLKKKKAGLNKRYAAVSVLNQAIPFICKRLEQEFGKEHVHYCSGRDTSMVRRSLGYHKTKEEQLHEVDAWCIAVLALRQIPEKAPEFDHVHEILQFRRQDRSIIDAQTSRMYYHEGKKVAKNRKKAEGQKDDSLQEWRERQVERYGKEQTRKMISQLEIKKSSRRYNRLDRLMPGAVFYYQGVRYVMRGQHSNRQYLQAVGMGSKDFPAKKCKIVVHNEGLVFVS

SEQ ID NO: 22773 - protein, 431 aa, unidentified
MPNKVYVINKHGRPLMPCSPAKARHLLDAGKAKVKKRTPFTIQLVYGSSGYTQEVILGVDAGSKTIGMSASTTKEELLSAEVKPRNDVVDLLSTRREFRRARRNRKTRYRKPRFDNRVRSKHKGWLAPSVEVKIQEHITSIKRVCRILPVSKVVIETAEFDLQLLKAIEEGKPVPQGEDYQQGEMYGHYNVRQYVLWRDGYTCQCCGAHATKKKEVRLHVHHLESRKVGGDAPDNQVTLCESCHEKLHKGLIAEKDFKKRKRKSTRDATFMGIMRKTLMQRLCSELPIPVIETRGYITKATREKLLVLPKSHTNDALAIAQGKQGFNVGYLPGIVQIDKICTIRPVRHHNRQLHKATILKGGIRKSNQTKKYVFGYRLFDKVQFNEQDCFIWGRRTTGIFTIKTINGKMIKDGISFKKLKPVEKSTSYLIA

SEQ ID NO: 22774 - protein, 423 aa, unidentified; identical to SEQ ID NO: 12394

SEQ ID NO: 22775 - protein, 417 aa, unidentified; identical to SEQ ID NO: 7125

SEQ ID NO: 22776 - protein, 431 aa, unidentified; identical to SEQ ID NO: 13666

SEQ ID NO: 22777 - protein, 425 aa, Planktothrix sp.; identical to SEQ ID NO: 4226
  source 1..425: note = isolate UBA8407

SEQ ID NO: 22778 - protein, 451 aa, unidentified; identical to SEQ ID NO: 18560

SEQ ID NO: 22779 - protein, 432 aa, unidentified
MSSARYWHEEKFSGRKVSEMTDYAFVLDANNKQLAPTKEQKAWFLIRRKRATLVSKYPMVIQLKKKIPDNEICKDEIRCGIDDGGLHVGVALVQKCQTRNKVVFKGTIEQRNDVKHLMDVRRGYRSYHRYHKRYRPARFNNRSSSKREGRIAPSILQKRQATIRVINQLNKWINITNYWLEDVAIDIRALTDGYKPYRWQYQKSNRLDENIRKAVILRDGCRCMECGKSNCRLEVHHIKPRRLKGSSTLGNLITLCTKCLQKTEGVEELYMDRYFALLNSSDNRNLDCAQHVMIGKKWLREQLSNLGMLYLTNGGDTANKRIDWDITKSHSNDAICITDLRPDTYEIKEWVIKPMRRQSKAKTDNVLGIKHRDLVEYTFRNGETHRGYVTALYPEQNAINFQSPIKHCKKVNAGKCKVLWKYSKIYWLDNVS

SEQ ID NO: 22780 - protein, 423 aa, Deinococcus sp.; identical to SEQ ID NO: 6340

SEQ ID NO: 22781 - protein, 420 aa, unidentified
MQYAYVLNKRGEPLMPCSPGKARILLKQQKACVVKRTPFTIKLLHGSAGYKQPITLGVDAGSKHVGLSASTEKRELYSEEFTPRNDVVELLSTRRQNRRSRRNRKTRYRAPRFNNRVHSKHKGWLAPSVEVKIQEHITVIKHICRILPITLVRVETAEFDTQRLKAMLAGKPLPVGTDYQLGEMYDEYNVRQYVLKRDNYTCQCCGAHTTAKKTVKLHVHHLESRKVGGNAPSNLITLCTTCHNNLHKGKITLDGKKRGKTLRDAAFMGIMRNTLLTRLRNELNIPVQNTYGYITKLLREQNDIKKSHVNDARCISKHPLAKPCSVCYRTKAIRHHNRQIHKAKILKGGIRKANQAPYIVKGFCLWDKVLYNEQECFISGRRSSGYFALRKFDGTTITNSISFKKLRLLEPATNYLIERK

SEQ ID NO: 22782 - protein, 438 aa, Microcoleus sp.
MCKVLLIDTEKRPLSPIYPAQARQLLRNKKAAVFRRFPFTLILKESRPDSPISPLRLKIDPGAKFTGIALVNDSTGEVVFAAELKHRGLAIRDSLTSRRQLRRSRRNRKTRYRPPRFLNRTRPLGWLAPSLQSRIGNIKAWVEKLRKFAPIAAISQELVRFDLQLMRNPDLQGKEYQQGTLAGYETREYLLEKWNRQCAYCGVKDVPLQIEHIYPRAKGGSNSITNLTLSCEKCNKKKGTKALKEFLKKDQSRLEKILKQAKRPLADAAAVNATRFALLYVLKETGLPVEIGSGGLTKFNRSQQNLEKSHWLDAACVGISTPILNIKGVKPLLICANGHGTRQSCRTDKFGFPIRHCSRTKFHFGFQTGDLVKAVVTRGKKVGEYVGRIVTRASGSFNISAKDGLVQGISHRYCSIIHKGWLFLCVIAPAPRFLSPPN

SEQ ID NO: 22783 - protein, 470 aa, unidentified; identical to SEQ ID NO: 16591

SEQ ID NO: 22784 - protein, 482 aa, unidentified
SLAAAAQESHDFNRGRCQYLTKGVSCMSTCVCVLSNSGERLMPTFRLGKVRHLLKDGKAKIVKHHPFTIQLLYDSKTNTQPIEICEDVGYNYIGISVKSQSHEYVSAQYDTLQDEKACHDSCRKYRRTRRNRLRYRKPRFDNRKRSEGWLAPSLRHKKELNVNVVKMYCAVMPITHATVEVGSFDTMLVKAIQEGKAIPEGADYQKGPRYNLATLREAVFYRDNYVCKVCGRKATEGAILHVHHMFYWKGRHGNSLSELITVCEKCHTPANHQKGGKLYGFGENVKFADLSGAAFMNTVRWQIVNELYAAFGKDFVTVTYGAMTKEKRIALHLEKSHNNDAYAMGNCHPAHRCEFGHYQKRCRNNRVLEKFYDATYIDTRTGDKAKGKELFNGRISRNHKKDSEDLHKYRSKKVSKGRRSIRRQRYAIQPYDTVRLKSKSYITSGCHNKGTRLLIPANGKSKSVAISKVQVVCHAGAWIQII

SEQ ID NO: 22785 - protein, 533 aa, Streptosporangium sp.; identical to SEQ ID NO: 19912

SEQ ID NO: 22786 - protein, 458 aa, unidentified; identical to SEQ ID NO: 4474

SEQ ID NO: 22787 - protein, 430 aa, unidentified
MSVAVVSKTGMLLMPTSEYRARKLLKSKKAIIHGYHPFTIQLTERETGYIQPVELCMDTGYIHIGTSVKSEKHEYLGEQIDTLTDERQKHDACRMYRRQRRNRKRYRQPRFNNRERDDGWIAPSLEHKKTIHIQAISRICKVIPVTDITLEMGNFDTQVLKAREEGRPLPQGLDYQHGERYSVTTLREAVFLRDGYTCQCCGRTIKDGAILHAHHVVYRSQGGTNRISNLITVCDKCHTPANHKPGGKLYGWKPKVASFKGATYMTTIRWKLYNEVKALFLDIDIHITYGAETKERRRAFDITKSHVNDAFVMGQFHPKHRSKPICYKKKRRNNRCLEKFYDAKYIDNRNGKTRTGQELFNGRISRNHKKDSENLHQYRRQKISAGKRTIRKQHYAIQSHDIVIFNGEKFETSGCHNNGTRVILLPQKKS

SEQ ID NO: 22788 - protein, 364 aa, Anabaena sp.
LITVEDKVNDSTGEVVFAAELKHRGFAIRDALTCRRQLRRSRRNRKTRYRQPRFNNRTRPLGWLAPSLKSRVENIKTWVDKLRKFAPVSAISQELVRFDMQLMRNPDIQGNEYQQGTLQGFETREYLLEKWNRECAYCGVKEVPFQIEHIHSKAQGGSNSITNLTLSCEKCNIKKGTKDIKDFLKQDPTRLEKILKQAKKPLADAAAVNTTRFALLEVLKSSGLPVETGSGGLTKFNRSQQNLEKSHWLDAACVGKSTPILNIQGIKPLLIQANGHGTRQMCGTDKFGFPNRHRTNRQVHHGFSTGDIIKAVVTSGKKIGQYFGRVLCRATGSFDIVTKLGRVSGISYKYCLATHKKDGYSYSF

SEQ ID NO: 22789 - protein, 420 aa, unidentified; identical to SEQ ID NO: 6507

SEQ ID NO: 22790 - protein, 442 aa, unidentified; identical to SEQ ID NO: 3658

SEQ ID NO: 22791 - protein, 436 aa, unidentified
MTKTLTTRTTQACVLDQQGKPLMPTTRLGKVYHLLKTKKAHIVSYEPFTIQLDYEPDTQVIQPMTLGVDSGAIHSGYSVANEHREYYSAEVIARNDISNRLSDRRMYRQTRRSRKTRYRKPRFNNRKNKKKGWLPPSLEQKVAVQVNEINHIHRYFPIETIIVETAEFDIQKIKNPDISGIEYQQGTLQGYNIRNYLLEKHGRKCFYCGKAVSDFEVEHMFPKSRGGSNRIDNLTLSCHDCNEKKGTLTAEEFIQQTLPVKKATAKLKELPNEKRLFKYMAYMNATRWALYDAIKERYPNVKMTYGYITKYNRIQAGLPKAHHIDAKCITGFATVPSMSQTVVKVKMRRHNRQLHRATFSKGHVRKAASLPTTVFGFQLYDLVLFNNHRYYIKGRRSSVAFALVSIEGLKNEERNYKKLTLLAHTNAYLTNYYVNR

SEQ ID NO: 22792 - protein, 414 aa, unidentified; identical to SEQ ID NO: 12795

SEQ ID NO: 22793 - protein, 421 aa, unidentified
MRGQPLMPCSPAKARHLLKAGKAVVKRRTPFTIQLRIATGETKQNVTLGVDAGAKHVGLSATTEKEEVFASEVELRQDITGLLAARLSLRRDRRHRKTRYRAPRFLNRVRSKHKGWLAPSVENRIQAHMSRIDAVCRLLPVTKIVIETASFDIQKIKDPSVEGTDYQQGDQLGFWNVREYVLFRDGHVCQHCHGRSKDKILNVHHLESRQTGGDAPNNLITLCETCHKAYHAGKIKLKVKRGQSFRAEAFMGIMRWTLLDRVRKAHPGLPVENTYGYLTKHTRITHGLPKTHCVDAYCIAGNLKAVRRGVYLHQRQMRKHNRQIHKFTVLSKRLEDGTKIGYRKLNQSPYLVHGFRLFDKVRCLGQIGFIFGRRSSGYFDVRRLDGVKLSPSISWRKLTLLEKRSTYLTELRKEDGASSPV

SEQ ID NO: 22794 - protein, 368 aa, unidentified
VTLGIDAGSKHIGVSATTKSKVLYEADIEIRNDIVDLLATRRQMRRARRSRKTRYRKARFDNRKRSNKWLAPSIQHKVNCHLDAVHFAHMLLPVSKIIVEVASFDIQKIKNPLISSTDYQNGELLDWKNVREYVLFRDGHICQCCKGRSKDPVLQVHHIESRKTGGNAPNNLITLCKTCHSGYHQGTVKLPTKIKRGMKFNNATFMGIMRWSFYDKLKALYPDVSLTYGYITKDVRITNGLVKTHFIDARCISENPLAVSDNTVYFLKKRRRHNRQIHKFNILKGGRKKRNQAAYLVKSYRLFDKVKYNHKEYFIFGRRASGFFDIRTLSGEKVNKGSISCKKLKLLEASKGYLTERRNAFLSPLNSV

SEQ ID NO: 22795 - protein, 453 aa, unidentified; identical to SEQ ID NO: 6850

SEQ ID NO: 22796 - protein, 512 aa, unidentified; identical to SEQ ID NO: 6489

SEQ ID NO: 22797 - protein, 415 aa, Bacillus sp.; identical to SEQ ID NO: 15146

SEQ ID NO: 22798 - protein, 498 aa, unidentified
MPTTRCGHIRYLLKEKKARVVASKPFTIQLLYETNDVVQPLYLGIDPGRTNIGVAVVKTDGTAVFTAHLETRNKEIPKLMKKRKDSRRARRTNGRRCRRQRRAKANDTISKKCVKQATAQNGSVSKRAKEIGVIKRHLPGCEKDVLCIGIKNKEAKFNNRTRPEGWLTPTANQLLQTHVNLVKKIQKFLPISDVVLEVNKFAFMQLDNPNVQKWQYQQGPLYQKANLEEAVSEMQEHHCLFCKKKIDHYHHVVPQHKNGSNTIDNIVGLCTKHHDLVHKETAWQEKLAKKKTGLNKKYGALSVLNQIIPALTKGLSSLFPKHFFVTTGKSTYDYRAAHDVCKDHWLDAYCIACSVLPNDVCDSNINSHAPYELKQFRRHDRRALHKENMNRVYTLNGKKVATNRHKAIEQTTDSLEEFRQRQPNDVCKLKVKEHHPEYRNPKRSFPGCVFLVGKQTHVMQGTSGSHNGKADGYYDTNGNSYPFGKCKFVAKSEGIVFA

SEQ ID NO: 22799 - protein, 419 aa, unidentified; identical to SEQ ID NO: 4877

SEQ ID NO: 22800 - protein, 458 aa, Lactobacillus sp.; identical to SEQ ID NO: 4474

SEQ ID NO: 22801 - protein, 358 aa, Erysipelotrichaceae sp.; identical to SEQ ID NO: 6503

SEQ ID NO: 22802 - protein, 415 aa, unidentified; identical to SEQ ID NO: 12480

SEQ ID NO: 22803 - protein, 449 aa, unidentified; identical to SEQ ID NO: 16728

SEQ ID NO: 22804 - protein, 464 aa, unidentified; identical to SEQ ID NO: 6574

SEQ ID NO: 22805 - protein, 417 aa, unidentified
MPCSPAKARLLLKERKAIVKRRTPFTIQLTIATGEAKQPVMLGVDSGYKHIGLSATTEKAELYASEVELRQDITGLLSARLALRRSRRSRKTRYRAPRFDNRVASKREGWLAPSVENRIAAHMSRVEAVMQVLPVTAITVETAAFDTQLLKNPDITGAAYQQGDKLGFWNVREYVLFRDGHVCQHCRGKSKDPILNVHHIESRRTGGDAPNNLITLCETCHKAFHRGEIKLKVRRGKSFKAETFMGIMRWTLLERLKKAHPELRVRNTYGYLTKHKRISYGIAKSHCADAYCIADNLGAKRLEGFFFQKQTRKHNRQIHKLSILKGGLKKKNQAPYEVKGFRLFDKVICKGEEAFIFGRRTSGSFDVRRLDGTRISAGINYKKLRLLEPRTTYLTEFRKEAALPPLHECRGFRAEFL

SEQ ID NO: 22806 - protein, 419 aa, unidentified; identical to SEQ ID NO: 6671

SEQ ID NO: 22807 - protein, 413 aa, unidentified; identical to SEQ ID NO: 3220

SEQ ID NO: 22808 - protein, 442 aa, Lactobacillus sp.; identical to SEQ ID NO: 3479

SEQ ID NO: 22809 - protein, 421 aa, unidentified
MVYVLDITGQPLMPTDRHGKVKHLLKDGKVKVVKRCPFTIQLLYTTTTYTQEITLGVDAGSKVIGLSASTPRRELYSSEVTLRNDIVKLLSLRREYRRSRRNRTTRYRAARFNNRVHSKNKGWLAPSIENKINTHIKVVADIHKILPISKIVVETASFDIQKIKNPNISGEEYQQGEQLDFWNVRQYVLFRDNYTCQCCKGKSKDNRLAVHHIESRQTGGNAPNNLITLCITCHKKYHKGKIKLPNTIKRDKIFKDAVFMGIMRWAFYERLKNIYPNIRMTYGYITKNTRIQHNLSKTHYTDALCISGNPLAKPLEVLYIQKAIRTRNRQIHKATISKGGIRKLNQAPKYVFGFQLYDKVLYKGKECFIFGRRLSGSFDIRTLDGTKISPGVSHKKLKLLEKRKTILTERVIKNQEGGKRG

SEQ ID NO: 22810 - protein, 518 aa, unidentified; identical to SEQ ID NO: 11951

SEQ ID NO: 22811 - protein, 440 aa, unidentified; identical to SEQ ID NO: 14910

SEQ ID NO: 22812 - protein, 435 aa, unidentified; identical to SEQ ID NO: 16785

SEQ ID NO: 22813 - protein, 457 aa, unidentified; identical to SEQ ID NO: 17713

SEQ ID NO: 22814 - protein, 415 aa, unidentified; identical to SEQ ID NO: 2674

SEQ ID NO: 22815 - protein, 421 aa, unidentified; identical to SEQ ID NO: 4235

SEQ ID NO: 22816 - protein, 414 aa, unidentified
MVYVINKQGQALMPTERFGKVRRLLKNSLAHVVCRIPFTIQLDYDTTDYTQPVSLGIDAGSKHIGISATTSEKELYAADVELRNDIVDKLSTRRELRRTRRSRLRYRKARFNNRVSSKRKGWLAPSVENKIQTHLTVVEKIHKFLPITNIVVETASFDIQKIKNSSISGVEYQQGEQLDFFNVREYVLFRDNHTCQHCKGKSKDKVLNVHHIESRKTGGDSPNNLITLCETCHKAYHRGEFELNVKRGKSFRDSAFMGIMRWKLYDRLKNIYPNVSMTFGYITKNTRITNNLPKEHYVDARCISGNPVAKPLGYYFYQKKVRCQNRQIHKANFLKGGRKKLNQAPFLVKGFRLFDLVEYQKELYYIFGRRSNGSFDIRKLDGTKVNKGSINCKYLRLIDKRKSILIEKRMQVNL

SEQ ID NO: 22817 - protein, 457 aa, unidentified
MDAVAVISASGKPLMPTNPMRARKLIKKGKAVIYKYRPLFTIRLTERTDGDIQTIEYCCDTGYQHIGLSIKSRKHEYVNEQRDLLPNETERHNGSRKYRKARRRRKLRHRACRRDNRHDNQICKDGYAPSIRNKRDQHISLYRSYTEILPVGRAVFEMGQFDTQVLKAIEKGEPLPQGKDYQHGERYGYATLREAVFARDSYTCICCGKNAFKDKRILCIHHLGFRIGDRTNRLANLATVCTKCHTPKNHQPKGKLYNLKPELKDFKGATFMTMVRWDMLDKLKVVSKDIQVDVTYGAATKEARRDLKIKKSHANDAYCMGSFHPSHRTDLKRYEKCRRNNRVLSKFYDATYIDIRDGKKKKANALGCNRTKRRESRRSEKNERIYRGKKVSKGRIVLRTKRTVIRPGDIVYTGKKKYIVASSKNLGKQLKLADGSLLTTSKVTKIIHCGGWKTVTL

SEQ ID NO: 22818 - protein, 406 aa, unidentified; identical to SEQ ID NO: 5685

SEQ ID NO: 22819 - protein, 273 aa, unidentified
KLQNPEVSGVKYQQGTLFEYEVREYLLEKFGRKCVYCGAEGVPLNIDHVVPRAKGGSNRVSNLVLACVSCNQKKGARSLEDFLKGKPEVLARVRRELKTPLRDAAAVNATRWVLFNELKATGLPVETGSGALTKLNRHAFGVEKEHWLDALCVGRLNGVVTRKGLNALEIRCMGRGSRQRTRLTKYGFPRGYLMRQKCVHGFATGDMVEANVPKGKKAGLWRGRVAVRVSGSFNIQTPKGVIQGVGWKHCRLISHNDGYGYAWLGHAPHSSPA

SEQ ID NO: 22820 - protein, 421 aa, unidentified
MTPMVYVLSKTGQPLMPTENHAKVRALLKQQKAKVVHRCPFTIQLLYDSTDYTQPVSLGIDAGSRHIGVSATTETKVLYEADVTLRNDIVDLLSTRREARRTRRSRKTRYRKPRFNNRIRKDGWLAPSIQQKVDTHLTTVRKVTEILPVNSITVETASFDIQKIKNPDIAGTGYQQGKQLDFWNVREYVLFRDGHKCQCCKGKSKDPVLNVHHIESRKTGGNAPNNLITLCETCHKGYHNGTVSLPKNIRRGMKFNDAAFMGIMRWTFFNRVKETYEPLGIMVNMTYGYITKNTRIEHNLPKDHFIDARCISGHPDAVSDGTVFYQKKVRCHNRQIHKQKILKGGIRKRNQAPYLVKGFRLFEKVKYHGKQYFIFGRRSSGFFDIRTLDGTKVNKGSVSCKKIRSLDMPRSYLTEERKAIV

SEQ ID NO: 22821 - protein, 470 aa, Blautia sp.; identical to SEQ ID NO: 2925

SEQ ID NO: 22822 - protein, 425 aa, Nodularia sp.; identical to SEQ ID NO: 3165

SEQ ID NO: 22823 - protein, 429 aa, unidentified
MQRVLVLDKLKSPLMPCHPARARELLRKQKAKVFRLKPFTIILIERTGGDVQPLELKVDPGSKVTGIAIVGEFRRGQRAIFAVNLEHRGPQIKAALEARRSLRRSRRSRKTRYRAPRFLNRTRQKGWLPPSIKSRADNVRTWTKKLTSHSPISSIAVETVRFDLQKIVNPEISGIQYQQGELLGYEVREYLLEKWGRKCAYCDAKGTPLEVEHIVPKSKRGSDRVSNLTLACNPCNQKKGSSDIEVFVKDQKRLAHIKRFSLAALRDAAAVNATRYATGDALKSFGLPTSFWSGGRTKKNRISQDYPKDHWIDACCVGVTGERVFIPIDLKPLLVKAESRGSRQKCLPDKYGFPRTAPKANKRVHGFQTGDLVEANVLKGKKSGRYKGRVAVRSTGNFNIKTDKLTVQGISYKSCRIVQRVDGYSYAMA

SEQ ID NO: 22824 - protein, 494 aa, unidentified
MTMVYVQNKDGKPLMPTTRYCYVRLLLKEKKARVVCTTPFTIRLNYDTPNITQDLILGIDPGRTNIGVAVVKEDGSCVFSAHLETRNKEVPLLMKKRAAFRRQHRTQDRRRKRQRRAIAAGTTVESNTIERLLPGYEKPIVCHHIRNKEARFNNRSRPAGWLTPTANHLLQAHINLIAKAAKFLPITKVVVELNRFAFMAMDNPNIRRWEYQQGPLYGLGSVKDAVYAQQDGHCLFCKKPIDHYHHVVPRRKNGSETLANRCGLCAKHHALVHTDKAWAEKLVTRKVGMNKKYHALSVLNQIIPHLMEYLGEETSYDVYATDGRSTKGFRIAKNVPKEHYTDAYCIACSILDANTKGSTPAEPFKLKQFRRHDRQACHQQRVDRKYYLDGKQVATNRHKAIEQKSNSLEEFRETYGDAAVSQLTVKPHPPQYKDMTRIMPGAVMNFCGAVGILLGSDGFHNGKPDYYKSTKEEKVRMRRCALLAQNAGMVFIPA

SEQ ID NO: 22825 - protein, 436 aa, unidentified
LGKDFYPLRRREQFLFSCQFIERSMASMQYVYVLNKHGEPLMPCSPGKARLLLKQQKACVVKRTPFTIKLLYGSAGYKQPVALGIDAGSKHVGLSASTEKRELYREEFTPRNDVVELLSTRRQNRRSRRNRKTRCRAPRFDNRVHSKHKGWLAPSVEVKIQEHITVIKRICRILPITLVRVETAEFDTQRLKAMLKGKPLPVGTDYQLGEMYDEYNVRQYVLKRDNYTCQCCGAHPTEKKPVRLHVHHLESRHVGGNAPNNLITLCVACHKALHEGKITLDKGKKRGKPLRDAAFMGIMRNTLLARLKDELNIPVKQTYGYITKLLREKNKIPKSHVNDARCIAKAPNAKPCDTMLYTRALRHHNRQIHKAKILKGGIRKKNQAPYLVKGFRLWDKVRYNGEECFITGRRSSGYFALKKYDGTVISNSASYKKLML

SEQ ID NO: 22826 - protein, 504 aa, unidentified; identical to SEQ ID NO: 5865

SEQ ID NO: 22827 - protein, 418 aa, unidentified
MVYVTNRQGKALMPTDRHGKVRRLLKSGLAHVVRRIPFTIQLDYDTTEITQPITLGIDSGSKFIGVCATTNKKELYAANVELRNDIVDKLSTRREQRRTRRSRLRYRKTRFNNRVSSKRKERVAPSVENKIQTHMTVVRNAYKILPISKIVVETASFDIQKIKNPNIDGEDYQNGEQMGFWNIREYVLWRDGHTCQHCHGKSGDKILNAHHLESRKTGGNSPSNLITLCETCHKAYHRGEFELKVKRGTSFRDAAFMGIMRWAFFERLKQIYTNVSMTFGYATKNTRIANGLPKEHYVDARCISENPQAKPLGYYFYQKKARCQNRQIHKINILKGGKKKLNQAPFMVKGFRLFDLVDYQKELFYVFARRKSGYFDIRRLDGTKVNKGSINCKKLRLVEIRRTLLTERRNSGSIPPRS

SEQ ID NO: 22828 - protein, 420 aa, unidentified
MQYVYVLNKHGEPLMPCSPGKARLLLKQQKACVVKRTPFTIKLLFGSAGYKQPITLGVDAGSKHVGLSASTEKRELYSEEFTPRSDVVELLSTRRQNRRSRRNRKTRYRVPRFDNRVHSKHKGWLAPSVEVKIQEHITVIKHICKILPISLVRVETAEFDTQRLKAMLAGKPLPVGTDYQLGEMYDEYNVRQYVLKRDNYTCQCCGAHTTAKKLVKLHVHHLESRKTGGNAPSNLVTLCTTCHKNLHKGRVTLDGKERGKPLRDAAFMGIMRKTLMVRLKEELPIPVQGTYGYITKMRREQNDIKKSHVNDARCISKHPLAEPCSVCYRTKAIRHHNRQTHKANFSKGGIRKRSQMPYVVEGYRLWDKVLYKGQECFVSGRRASGSFTLKKLDGTRISKGVTFKKLRLLEPATNYLIERM

SEQ ID NO: 22829 - protein, 416 aa, unidentified
VSETTNYAFVLDANNKQLAPTKEQKAWFLIRKKRATLVSKYPMVIQLKKKIPDKEICKDEVRCGIDDGGLHVGIALVQKCQTRNKVIFKGIVEQRNDVKHLMDVRRGYRRYHRYHKRYRPARFDNRKSSKREGRVAPSILQKRQATIRVINQLNKWINITNYWLEDVAIDIRALTDGYKPYRWQYQKSNRLDENIRKAVILRDGCKCMECGKSDCRLEVHHIKPRRLKGSYTLGNLITLCTKCHQKTEGVEELYMDRYFALLRSSDNKNLNYAQHVMIGKKWLREQLSNLGILYLTNGGDTANKRIDWDIVKSHSNDAICITDLRPDTCEIKEWVIKPMRRQSKAKTDNVLGIKHRDLVEYIFRNGEIHRGYVTALYPEQNAINFQSPTKHCKKVNARKCKVLWKYSKIYWLDNVS

SEQ ID NO: 22830 - protein, 536 aa, Anaerostipes sp.; identical to SEQ ID NO: 2718

SEQ ID NO: 22831 - protein, 328 aa, Parasutterella sp.; identical to SEQ ID NO: 16634

SEQ ID NO: 22832 - protein, 419 aa, unidentified; identical to SEQ ID NO: 4131

SEQ ID NO: 22833 - protein, 279 aa, unidentified
VVVETAEFDLQLLKAIADGKPVPQGEDYQKGEMYGHYNVRQYVLWRDNYTCQCCGTHPSKKKEVRLHVHHLESRKVGGDAPDNQVTLCESCHEKLHKGLIAEKDFKKRKRKSTRDATFMGIMRKTLMQRLCSELPIPVVKTRGYITKATREKLLVLPKSHTNDALAIAQGKRGFNVGYLPEIAQIDKIYTIRPVRHHNRQLHKATILKGGIRKSNQTEKYVFGYRLFDKVQFNGQDCFIWGRRTTGIFTIKTINGKMIKDGISFKKLKPVEKSTSYLIA

SEQ ID NO: 22834 - protein, 293 aa, Parasutterella sp.; identical to SEQ ID NO: 6812

SEQ ID NO: 22835 - protein, 440 aa, unidentified; identical to SEQ ID NO: 2597

SEQ ID NO: 22836 - protein, 425 aa, Nodularia sp.; identical to SEQ ID NO: 3165

SEQ ID NO: 22837 - protein, 417 aa, unidentified
MIYVRSKEGSVLMPTERCGKIGYLLRHGKAHVVSRVPFVVQLDYDSTTYTQDVSLGIDAGSKHIGVSASSEKKEMLSAQVELRSDIVNLLSTRRELRQTRRNRKTRYRKARFDNRKKKDGWLAPSVEQKIESHLKVIRLVHKILPITKTTIEVAQFDAQKIKNPYIKGDEYQQGEQMGFWNVREYVLARDGHKCVHCKGKSKDPILNVHHLESRKTGGNSPSNLVTLCETCHKAYHRGEFDLKIKRGSSLRDAAVMNIMRWAVYERAKAEFGNVHLTYGYITKHTRIENGIAKTHAADAFCIAKNVHAMRLSSFFMCRCVPRHTRALHVANPKKCGIRRNTIASHKIGKSNFQRFDMVRWMGKECFIFGSTHGRPVLRDIDGLQVANQPSVNIKTIKFLKRLKNNILMEEKNFRRLN

SEQ ID NO: 22838 - protein, 431 aa, unidentified; identical to SEQ ID NO: 4306

SEQ ID NO: 22839 - protein, 494 aa, unidentified; identical to SEQ ID NO: 12326

SEQ ID NO: 22840 - protein, 311 aa, unidentified; identical to SEQ ID NO: 10911

SEQ ID NO: 22841 - protein, 423 aa, unidentified; identical to SEQ ID NO: 3951

SEQ ID NO: 22842 - protein, 555 aa, unidentified; identical to SEQ ID NO: 2442
  source 1..555: note = Lachnospiraceae bacterium UBA2826

SEQ ID NO: 22843 - protein, 428 aa, Oblitimonas sp.; identical to SEQ ID NO: 4442
  source 1..428: note = isolate UBA8407

SEQ ID NO: 22844 - protein, 480 aa, unidentified
LYTKPLDNIGEGSLPSSGEINLKGMTFMVYVKSIDGKALMPTSNAKARKLLKQKKAKVVSLRPFVVKLTYKTKTEYTQKLNLGVDSGYYNIGFSVIDAKQEYIAGEVKLLEGMKKRLLEKASYRRIRRSRLRYRKARWNNRVKSKKKGWLAPSLKHKLDTHIKFIDYLKNILPIGKITIEVANFDIQKMKYDLISGVDYQNGDMFGFWNVREFVLHRDGHKCQNPNCIHKDKKEQILKVHHIRYRSEGGSDRPENLITLCSKCHTPANHKKGKFLYDWCVNGKKVRGFKDATFMSMIRWYLVNELKSKHNNVSITYGYITKNHRIQNGIEKSHLNDAFAIAKGTNQARTKDRFLVIQDRLKNRSLEKFYDSKIIDIRTEKKVSGGDLSCGRSTKNKNLNTENLRKYRGVKISKGQRRIRKQKYFYQPNDLVKYDGKVYTVKGTQNEGKYIALKEIKKVPKVELLIPYVFKKGLNWSYGLC

SEQ ID NO: 22845 - protein, 348 aa, Anoxybacillus sp.; identical to SEQ ID NO: 18653

SEQ ID NO: 22846 - protein, 515 aa, unidentified; identical to SEQ ID NO: 3339

SEQ ID NO: 22847 - protein, 431 aa, Moorena sp.; identical to SEQ ID NO: 2831

SEQ ID NO: 22848 - protein, 425 aa, unidentified
VLQTTNPFQHWRRITTDRKVEQTEPVRYPSMENTLKVFVLNMRGQPLMPCSPPKARKLLRAGKAVPVRRTPFVIQLTVPTGETKQPITLGVDAGYKHVGLSATTAKEELLASEVELRQDVTGLLSDRLALRRARRNRKTRYRAPRFDNRVRSKHKGWLAPSVENRIQAHISRIEAVCRVLPITKIVIETASFDIQKIKNPEVEGTDYQQGEQLGFWNVREYVLFRDGHVCQACKGRSKDLILNVHHIESRKTGGDAPGNLITLCEACHKAYHAGKLKQFSPRRGASFRAETFMGIMRWTVLNRLRERHPELPVTNTYGYLTKHKRIVAGLPKTHCADAFCIAGVLDAKRRGEYLFQKQTRRHNRQIHKLTILKGGVRKRHQAPYLVHGFRLFDKVLCKGEVGFIFGRRSSGAFDVRRLNGTKISA

SEQ ID NO: 22849 - protein, 422 aa, unidentified
LRVFVWNKRRKPLMPCSPAKARHLLKEKKAAVVRRTPFTIQLTIATGESKQPVTLGVDAGYKHVGLSASTEKAELYASEVELRQDVSDLLSARRALRQSRRNRKTRYRAPRFDNRIRTKRKSWLAPSVENRINAHLSRIEAVLRLLPVTKITVETASFDMQLLKNPDISGKEYQEGEQLGFWNVREYVLFRDGHVCQHCHGRSKDPVLNVHHLESRRTGGDSPGNLITLCETCHKALHRSEITLKTKRGQSFRAEAYMGLMRWEVLNRLKTSHPGLEVHNTYGYRTKYTRIVNGIDKSHCADAFCIAGNLGAERLGEFFFQKQTRRNNRQIHKLSILKGDIRKRNQAPFEVNGFRLFDKVACKGEEGFIFGRRSSGFFEVRKLDGTCISAGISYKKLHLLEKRRTYLTEIRKEEALPPLPEG

SEQ ID NO: 22850 - protein, 499 aa, unidentified
MRYVYVLDVDGNPLMPTCRYGKVRRMLKSGQAKAVDTLPFTIQLTYKPKTYILQPVTLGQDPGRTNIGMAAVSSDGKELGRFHCTTRNKEIPKLMADRRAARRASRRGERLARKRLARKLHTTAKHLSERMLPGYDKPLAVKDILNTEARFNNRLRPEGWLTPTATQLLRTHINLFMRLAKILPVTDVAVEINKFAFMQLDNLDMRKWDIDFQRGPLYGTGGLEAAVSEQQNGTCLLCGKAPVGHYHHIVPRSRRGSNTVSNIVGLCPECHELVHKDTDAAQRLAEVKSGLLKKYGGASVLNQIIPSLVETLAGLFPGHAHVTNGWNTKKFREEHDLEKDHDVDAYCIACSHLEPKDPQAETEPFEIQQFRKHNRAIIHHQTERVYKLDGVIIARNRRKRMDQKTDSLEEWYADMVMEHGKTQTDAMRSGLTVRKSTRYYNAPKRTMPGTVFLYEGKRYVMTAQHTNGRYYRAYGAGKKEFPAAKVRILRKNTGLVFAA

SEQ ID NO: 22851 - protein, 453 aa, Scytonema sp.; identical to SEQ ID NO: 12367

SEQ ID NO: 22852 - protein, 192 aa, unidentified; identical to SEQ ID NO: 19880

SEQ ID NO: 22853 - protein, 419 aa, Bacillus sp.; identical to SEQ ID NO: 11166

SEQ ID NO: 22854 - protein, 472 aa, unidentified
  source 1..472: note = Oxalobacteraceae bacterium
LSVFVLDQKLRPLMPCREKRARKLLAAGRARIHRLYPFCIRIVDRALEDSVLQPLVIKIDPGSKVTGLAVCRISEAVDDDGVVAPVMHIQFLMELLHRGQTIKQSLHARSSMRRRRRGNLRYRQPRFDNRTRQAGWLPPSLLHRVLTIETWVNRIRNMAPITQIAQELVRFDMQKMQNPEIAGIEYQQGTLAGYELREYLLEKWNRECSYCGAKDLPLQMEHIVAKANGGSNRASNLCLGCESCNQKKGAKDIRAFLKNDPIRLAQILKHAKMSLRDAAAVNATRNALLKVLKATDLPVETGTGGRTKWNRSRLGIVKTHALDAACVGVVADVVSINAPALQITCMGRGTHSRTLLDQYGFPRTTLPRTKTFFGFKTGDMITAEVTKGKRIGSHKGRVAVRSSGYFNIQSGIKGMKAVQGIPHKDCRIAQRADGYNYLWKSVSDQPKAKASTAVQSAPCLTALKDGVSRSIF

SEQ ID NO: 22855 - protein, 431 aa, unidentified; identical to SEQ ID NO: 6230

SEQ ID NO: 22856 - protein, 436 aa, unidentified; identical to SEQ ID NO: 18680

SEQ ID NO: 22857 - protein, 436 aa, unidentified
MTKTLTTRTIQACVLDRHGKPLMPTTRLGKVYRLLKAQKAHIVSYEPFTIQLDYEPDTQVIQPMTLGVDSGAIHSGYSVANEHREYYSAEVIARNDISNRLSDRHMHRRNRRSRKTRYRKPRFNNRKNKKKGWLAPSLEQKVAVQVNEIEHIYRHFPIETIIVETAEFDIQKIKNPNISGIEYQQGTLQGYNIRNYLLEKHGHKCFYCGKTVSGFEVEHMLPKSRGGSHRIDNLTLSCHDCNQKKDTLTAEEFIRQILPAKKAAAKLKQLPNEKRVFKYMAHMNATRWTLYDTVKEKYPNVKMTYGYITKHNRIQAELPKAHHIDAKCITGFATVPSISQTVVKVKMRRHNRQLHRATFSKGHVRKAANLPTVTFGFQLHDLVCFNNHRYYIKGRRSSGSFALVSVEGLKDENRNYKKLTLLAHTNAYLTNRYINA

SEQ ID NO: 22858 - protein, 254 aa, unidentified
MVYVQDINGKPLMPTTRHGKVRRLLKDKKAVVVNLCPFTIKLMYVTSDYKQEIVLGVDAGTKHVGLSATTKSKELYSSEVILRNDIVDLLSTRRELRRARRNRLRYRKPRFNNRIKSKRPGWIAPSVKYKIDAHIRVVENVCSILPISRIVIEVAQFDTQKIKNPNISGKEYQEGDQLGFWNTREYVLARDGHKCQYCKGKSKDKILNVHHIESRKTGGDSPSNLITLCETCHKEYHKGNIDLKIRRGKSLRDA

SEQ ID NO: 22859 - protein, 442 aa, unidentified; identical to SEQ ID NO: 3234

SEQ ID NO: 22860 - protein, 442 aa, unidentified; identical to SEQ ID NO: 2903

SEQ ID NO: 22861 - protein, 338 aa, unidentified
TRREFRRARRNRTTRYRKPRFNNRVHSKNNGWLAPSVEVKIQEHITSIKRVCAILPISKIVVETAEFDLQLLKAVQDGKPVPEGEDYQKGEMYGSYDVRQYVLWRDNYTCTCCGVKGTDKKPVKLHVHHFESRKHGGNAPDNYGTLCEDCHKKLHLGIITDISLKTRKRPSTRDAAFMGIMRKTLMQRLITGLSIPVAETKGYITKAAREEILKLPKTHTNDALAIAQGRHGFGIREQAYVKPTNRIYTVRPVRHHNRQLHKATMLKGGIRKLNQASKYIFGFRLYDKVLYQGGECFVWGRRRSGSFLLRTIDGTKVKDGVGYRNLTLLERSTNYLIA

SEQ ID NO: 22862 - protein, 428 aa, unidentified; identical to SEQ ID NO: 6748

SEQ ID NO: 22863 - protein, 431 aa, unidentified
MPNKVYVINKHGRPLMPCSPAKARHLLDAGKAKVKKRTPFTIQLVYGSSGYTQEVILGVDAGSKTIGMSASTTKEELLSAEVKPRNDVVDLLSTRREFRRARRNRKTRYRKPRFDNRVRSKHKEWLAPSVEVKIQEHITSIKRVCRILPVSKVVIETAEFDLQLLKAIADGKSVPQGEDYQKGEMYGHYNVRQYVLWRDNYTCQCCGAHATKKKEVRLHVHHLESRKVGGDAPDNQVTLCESCHEKLHKGLIAEKDFKKRKRRSTRDATFMGIMRKTLMQRLYSELPIPVIETRGYITKATREKLLVLPKSHINDALAIAQGKHGFNVGYLPEIAQIDKIYTIRPVRHHNRQLHKATILKGGIRKSNQAEKYVFGYRLFDKVQFNGQDCFIWGRRTTGIFTIKTINGKMIKDGISFKKLKPVEKSTSYLIA

SEQ ID NO: 22864 - protein, 470 aa, unidentified
MSVFVVGLNGCRLMPASERKARLLLKGGKASVYRKVPFTIKLNYKTGSTVQPGYLGIDTGSQHIGVSVVQKDGTVLHKEEIGLRDSMSKRKLLESRASSRRGRRYRKTRYRHPKWKPKTKRIYNEKADRKGRHWKKQKNTFTSKRQAGWLPPSLQSKTDHHIQWIRKLLDLLPEGYRLSIELGRFDPARMKDPGIHGELYQKGPQYDYENVRAYVLARDGYTCRVCKKNGGKLHVHHILYRSRGASDDPKYMAAVCSNCHTTENHLPGGILYQWMQDQKKFTRGLRDATFMNILKKRLRKAFPDAVFTYGNITKADREKLELPKSHGNDATAIALVKTEVTSVKDEEPVIHIQQVRRKKRSLHEETPRKGRKEPNRTASRIDKNTKSVTVTKGSGEKKASMTACLFDRVELDGKKGWITGFTGTSCYVKDKEDSYICTSPKYKQVSISRLRILHHCGNWAIGAEKPLGKR

SEQ ID NO: 22865 - protein, 456 aa, unidentified
MSTCVCVLSNSGERLMPTFRLGKVRRLLKDGKAKIVKHHPFTIQLLYDSKTNTQPIEICEDVGYNYIGISVKSESHEYVSAQYDTLQDEKEHHDDCRKYRRTRRNRLRYRKPRFDNRKRSEGWLAPSLEHKKQLNIRLVERYVSVIPITHATVEVGSFDTMLLQAIQKGESKPEGADYQKGPRYNLATLREAVFYRDNYTCQVCGRKIADGAILHMHHMFYWKGRHGNSLDELLTVCEKCHTPANHQKSGKLYGFGEDVKFANLSGAAFMNTVRWQIVNELYAAFGKPFVTFTYGAMTKEKRIALHLEKSHNNDAYAMGDYHPAHRCEFGHYQKRCRNNRVLEKFYDATYIDTRTGNKAKGKELFNGRISRNHKKDSEDLHKYRSKKVSKGRCSIRRQRYAIQPYDTVRLESKTYITSGCHNKGTRLLIPANGKSKSVAISKVQVVCHAGAWIQII

SEQ ID NO: 22866 - protein, 294 aa, unidentified
MTAIQRACAILPVSKVVVETAEFDLQLLKAVAEGKPVPQGEDYQKGEMYGHYNVRQYVLWRDSYTCRICGVHGSVRKGVPLHVHHLESRRVGGDAPDNLVTLCTACHDKLHKGIIMAADIKKRKRRSTRDATFMGIMRMTLLRRLREQLPVPVVETRGYITKATRENLLVLPKSHTNDALAIAHGPQGFRAEYLPNIRQADRLYTIRPVRHHNRQLHKATILKGGVRKANQAEKYICGFRLYDKVLYNGIECFVWGRRTSGSFLLRQLNGEKVKDGVSYKHLKLLERSQSYLVA

SEQ ID NO: 22867 - protein, 318 aa, unidentified
LVKKIQKFLPISDVVLEINKFAFMRLDNPNVQKWQYQQGPLYQNASLEEAVSEMQEHHCLFCKKPIAHYHHVVPQSENGSNTIGNIVGLCTKHHDLVHKDTAWQKKLAKKKTGLNKKYGALSVLNQIIPALTKELSSLFPKHFFATNGKSTYDYRAAHGVSKDHWLDAYCIACSVLPNDVCDSNINSRVPYELKQFRRHDKRALHKANMNRVYTLDGKKVATNRHKAIKQTTDSLEEFRQRQPDDVCKLKVKEHHPEYRNPERNFPGCVFLVGKHTHVMQGTSGSHNGQADGYYDTNGNSYSSGKCKFVAKNEGIVFA

SEQ ID NO: 22868 - protein, 475 aa, unidentified; identical to SEQ ID NO: 4985

SEQ ID NO: 22869 - protein, 419 aa, unidentified; identical to SEQ ID NO: 6046

SEQ ID NO: 22870 - protein, 442 aa, unidentified; identical to SEQ ID NO: 2834

SEQ ID NO: 22871 - protein, 462 aa, unidentified; identical to SEQ ID NO: 14482

SEQ ID NO: 22872 - protein, 426 aa, unidentified; identical to SEQ ID NO: 3614

SEQ ID NO: 22873 - protein, 456 aa, unidentified; identical to SEQ ID NO: 6026

SEQ ID NO: 22874 - protein, 386 aa, unidentified
LTIATGEAKQPVSLGVDAGYKHVGLSASTEKAELYASEVELRQDITDLLSARRALRQSRRNRKTRYRAPRFDNRIRTKRKGWLAPSVENRINAHLSRIEAVLRLLPITKITVETASFDMQRLKNPDISGKEYQEGEQLGFWNVREYVLFRDGHVCRHCHGRSKDPVLNVHHLESRRTGSDSPDNLITLCETCHKALHRGEITLKAKRGQSFRAQAFMGIMRREVLNRLKASYPELKVHETYGYLTKHARIANGIVKSHGADAFCIAGNLGAERLGEFFFQKQTRRNNRQIHKLSILKGGIRKRNQAPFEAKGFRLFDKVACQGEEGFIFGRRSSGSFDVRKLDGTRISAGISCKKLRLLEKRRTYLTEIRKEEALPPLPEGRGLRA

SEQ ID NO: 22875 - protein, 383 aa, unidentified
LKVFVLNMRGQPLMPCSPAKARHLLKAGKAAVRRRTPFTIQLRIATGETKQSVTLGVDAGAKHVGLSAATEKEEVFASEVELRQDITGLLAARLSLRRDRRHRKTRYRAPRFLNRVRSKHKGWLAPSVENRIQAHMSRIDAVCRLLPVTRIVIETASFDVQKIRNPEVEGTGYQQGDQLGFWNVREYVLFRDGHVCQHCHGHSKDKILNVHHLESRQTGGDAPNNLITLCETCHKACHAGKIKLKVKRGQSFRAEAFMGIMRWTLLDRMRKAHSGLPVENTYGYLTKNTRITPGLPKTHCVDAYCIAGNLKAVRRGVCLHQRQVRKHNRQIHKCTVLSKTLKDGTKIGYRKLNQTPHLVKSFRLFDKVRCLGQTGFIFGRRSS

SEQ ID NO: 22876 - protein, 494 aa, unidentified; identical to SEQ ID NO: 4514

SEQ ID NO: 22877 - protein, 420 aa, unidentified; identical to SEQ ID NO: 6507

SEQ ID NO: 22878 - protein, 421 aa, unidentified
MRGKPLMPCSPAKARHMLKAGKAVVVRRTPFTIKLTIATGETKQDVTLGVDAGARHVGISATTEKEEVFASEVALRQDITGLLADRLAFRRARRNRKTRYRAPRFNNRVRSKHKGWLAPSVENRIQAHMSRIDAVCRLLPVTKIVIETASFDVQKIKNPTIEGTDYQQGDQLGFWNVREYVLFRDGHICQHCRGRSKDPILNVHHLESRKTGGDAPNNLITLCETCHKAYHAGKIKLKVKRGQSFRAEAFMGIMRWTLLDRVRKAHPGLPVENTYGYLTKNTRITLGLPKAHCVDAYCIAGNLKAVRRGVCLHQRQVRKHNRQIHKCTVLSKTLKDGTKIGYRKLNQTPHLVKNFRLFDKVRCLGQTGFIFGRRSSGYFDVRRLDGVKLSSGISYRKLTLLEKRSTYLTELRKEDGASSPV

SEQ ID NO: 22879 - protein, 399 aa, unidentified
ICEDVGYNYIGISVKSESHEYVSAQYDTLQDEKEHHDDCRKYRRTRRNRLRYRKPRFDNRKRSEGWLAPSLEHKKQLNIRLIERYVSVIPITRATVEVGSFDTMLLQAIQKGESKPEGVDYQKGPRYNLATLREAVFYRDNYTCQVCGRKVADGAILHMHHMFYWKGRHGYQLDELVTACEKCHTPANHQKGGKLYGFGKDKKFANLSGAAFMNAVRWQIVDALHATYGKEFVTITYGAMTKEKRIALQLEKTHNNDAYAMGDYHPACRCKFRHYQKRRRNNRVLEKFYDATYIDARTGNKAKGKELFNGRISRNHKKDSENLHKYRSKKVSKGRRSIRRQRYAIQPYDTVRLENKTYITSGCHNKGTRLLIPANGKSKSVAISKVQVVCHAGAWIQII

SEQ ID NO: 22880 - protein, 430 aa, unidentified
MAVFVLDKHKKPLMPCTEKRARLLLERRRAVVHKMSPFTIRLKDRTVEQSQLQPLRLKLDPGSKTTGLAILREDDSESSTAILLAELRHKPGIKEKLDDRSTQRRNRRNRKTRYREKRFDNRAKPSGWLPPSLQARVNQASNVAAKLQKLLPITAISTEHAKFDTQLLQNPAIAGIEYQQGELLGYEIREYLLEKWKRVCAYCGKADTPLEIEHITPKSRGGSNRISNLTLACRLCNQTKGNKTAEEFGYPEIQKQAKLPLKDAAAMNTTRWRLLNQLKETGLPVECGTGARTKKQRIEHGLPKTHYYDACCVGAGTPANLVTLQKYVSIWKAIGRGTRKMCNTDKYGFPKSHRQRKKNHFGFQTNDIAKADVLRGKYQGIHTGRVVVRAKGCFDLKDIAGNRICQGISHKYFRLLQRADGWQYDKTKIA

SEQ ID NO: 22881 - protein, 415 aa, unidentified; identical to SEQ ID NO: 7777

SEQ ID NO: 22882 - protein, 414 aa, unidentified
MVYVINKQGQALMPTERFGKVRRLLKNSLAHVVCRIPFTIQLDYDTTDYTQPVSLGVDAGSKHIGISATTSEKELYAADVELRNDIVDKLSTRRELRRTRRSRLRYRKARFNNRVSSKRKGWLAPSVENKIQTHLTVVEKIHKFLPITNIVVETASFDIQKINNPSISGSEYQQGEQLDFFNVREYVLFRDNHICQHCKGKSKDKVLNVHHIESRKTGGDSPNNLITLCETCHKAYHRGEFELNVKRGKSFRDAAFMGIMRWGFYDRLKNIYPNVSMTFGYITKNARITNNLPKDHYVDARCISGNPVAKPLGYYFYQKKVRCQNRQIHKANFLKGGRKKLNQAPFLVKGFRLFDLVEYKKELYYIFGRRSSGSFDIRKLDGTKVNKGSINCKYLRLIATRKSILTEKRMQVNL

SEQ ID NO: 22883 - protein, 433 aa, unidentified; identical to SEQ ID NO: 16249

SEQ ID NO: 22884 - protein, 431 aa, unidentified
MPNKVYVINKHGRPLMPCSPAKARHLLDAGKAKVKKRTPFTIQLVYGSSGYTQEVILGVDAGSKTIGVSALTKKEELFAANVIPRNDVVDLLSTRREFRRARRNRKTRYRKPRFDNRVRSKHKGWLAPSVEVKIQGHITAIRRVCGILPVSKVVVETAEFDLQLLKAIADGKPVPQGEDYQKGEMYGHYNVRQYVLWRDNYTCQCCGAHATKKKEVRLHVHHLESRKVGGDAPSNLITLCDSCHEKFHKGIITAANLKKRKRRSMRDATFMGIMRKTLMQRLCSELPIPVIETRGYITKATREKLLVLPKSHTNDALAIAQGKQGFNVGYLPGIVQINKIYTIRPVRHHNRQLHKATILKGGIRKSNQAGKYVFGYCLFDKVQFNGQDCFIWGRRTTGIFTIKTINGKMIKDGISFKKLKPVEKSTSYLIA

SEQ ID NO: 22885 - protein, 418 aa, Moorena sp.
MQNYVFVIDTNKQPLNPISPKKARRLLEKGKAAVFRMYPFTIILKTAIDNPTISPCQIKIDPGSKTTGFALVRDNQVIWGMELEHRGGLIKKKLESRRAVRRGRRNRNTRYRKPKFLNRKRPEGWLPPSLEHRILTIQTWVRRLIKFCPVNEIWIERVKFDTQKMQNPEINGVQYQQGELAGYEVREYLLEKWGRQCAYCGKQNVQLQIEHIHPKSKGGSDRVSNLCLACEKCNQGKGNKPIEEFLNKKPSLLQKIKTKAKQPLKDAAAVNATRNKLVKVLNKVRPVVTGTGAQTKYNRTRLGLPKQHWIDAACVGDIENLTLITSQPLLATCKGQGGRQKAALNKYGYPIRHNPLKPIKGWVTGDIGKHQKLGTGKVTPRSKGSFGFTPLGMKVYKSCKPQDISAIHRKDGYGYRFC

SEQ ID NO: 22886 - protein, 531 aa, unidentified; identical to SEQ ID NO: 4135

SEQ ID NO: 22887 - protein, 451 aa, unidentified; identical to SEQ ID NO: 5203

SEQ ID NO: 22888 - protein, 443 aa, Actinomadura sp.; identical to SEQ ID NO: 3431

SEQ ID NO: 22889 - protein, 420 aa, unidentified; identical to SEQ ID NO: 21345

SEQ ID NO: 22890 - protein, 409 aa, unidentified
AFVLDANNKQLTPIKEQKAWFLIRKKRATLVSKYPMVIQLKKKIPDKEICKDEVRCGIDDGGLHVGVALVQKCQTRNKVVFKGVIEQRNDVKHLIDVRCGYRRYHRYHKRYRSARFNNRNSSKREERIAPSILQKRQATIRVINQLNKWINITNYWLEDVAIDIRALTDGYKPYRWQYQKSNRLDENIRKAVILRDGCKCMECGKSNCRLEVHHIKPRRLKGSSTLDNLITLCTKCHQKTESVEELYMDRYFALLNSSDNKNLNYAQHVMIGKKWLREQLSNLGMLYLTNGGDTANKRIDWDIAKSHSNDAICITDLRPDTCEIKEWAIKPMRRQSKAKTDNVLGIKHRDLVEYTFRNGETHRGYVTALYPEQNAINFQSPTKHCKKVNAKKCKVLWKYSKIYWLDNVG

SEQ ID NO: 22891 - protein, 424 aa, unidentified; identical to SEQ ID NO: 13009

SEQ ID NO: 22892 - protein, 477 aa, unidentified; identical to SEQ ID NO: 12969

SEQ ID NO: 22893 - protein, 420 aa, unidentified; identical to SEQ ID NO: 13994

SEQ ID NO: 22894 - protein, 227 aa, unidentified
MVYVVANDGQPLMPTERHGKVCRMLRSGMAKVIKKCPFTIQLQYESERNVQPVSLGVDAGSKHIGISATTKAKVLYESDVELRDDIVKLLATRRQLRRSRRSRKTRYRPARFDNRKRKEGWLAPSIRQKIGSHLTVVANVCKILPINQIIVETASFDIQKIKNPEIQGIEYQQGEQMDFWNVREYVFFRDGHTCQCCKGRSKDKILNVHHIESRKTGGNAPNNLITL

SEQ ID NO: 22895 - protein, 315 aa, unidentified; identical to SEQ ID NO: 4900

SEQ ID NO: 22896 - protein, 433 aa, unidentified; identical to SEQ ID NO: 13677

SEQ ID NO: 22897 - protein, 417 aa, unidentified
VYVLNKHGEPLMPCSPRKARLLLKQKKACVVKRTSFTIKLLYGSTGYKQPITLGVDAGSKHIGISATTEKHELYREEATPRNDVVDLLSARRAFRRSRRNRKTRYRAPRFDNRVHSKHKGWLAPSVEVKIQEHITLIEHVCRILPVTLVRVETAEFDTQRLKAMLEGKPLPVGTDYQLGEMYDEYNVRQYVLKRDNYTCQCCGAHSTKTKGVKLHVHHIETRRTGGNAPNNLITLCKACHKALHAEKVTLDGKKRGKPLKDAAFMGIMRKTLMERLRKELKIPVQGTYGYITKYLREKNGIPKSHTNDARCISKNPLAIPCDTCYYTKAVRHHNRQLHKATILKGGIRKANQAPYIVKGYRLWDKVSCNGTECFITGRRTSGYFALKKLDGTVASNSISYKKLRLLEAATNYIIERK

SEQ ID NO: 22898 - protein, 417 aa, unidentified
MPCSPAKARLLLKEKKAIVKRRTPFTIQLTIATGEAKQPVALGVDSGYKHIGLSATTEKAELYASEVELRQDITDLLSARLALRRSRRSRKTRYRAPRFDNRVASKRKGWLAPSVENRIAAHMSRVEAVMRVLPVTAITVETAAFDTQLLKNPDIAEAAYQQGEQLGFWNVREYVLFRDGHVCQHCRGKSKDPILNVHHIESRRTGGDAPNNLITLCETCHKAFHRGEIKLKVKRGKSFKAETFMGIMRWTLFERLKKAHPELRVRNTYGYLTKHKRISHGIAKSHCADAYCIADNLGAKRLEGFFFQKQTRKHNRQIHKLSILKGGLRKKNQAPYEVKGFRLFDKVICKGEEAFIFGRRTSGSFDVRRLDGTRISAGINYKKLRLLEPRTTYLTEFRKEAALPHLHKCRGFRAEFL

SEQ ID NO: 22899 - protein, 450 aa, unidentified; identical to SEQ ID NO: 4205

SEQ ID NO: 22900 - protein, 418 aa, Moorena sp.; identical to SEQ ID NO: 6948

SEQ ID NO: 22901 - protein, 429 aa, Planktothrix sp.; identical to SEQ ID NO: 6772
  source 1..429: note = isolate UBA10369

SEQ ID NO: 22902 - protein, 499 aa, unidentified; identical to SEQ ID NO: 10243

SEQ ID NO: 22903 - protein, 323 aa, unidentified
MVYVLNLEGEPLMPTNNAKARKLLKNQKAKVVKVKPFVIQLLYRTTEYKQPIILGIDSGYLNIGFSAITNKKELLVGEVKMLKGMKDRLLERSQYRKIRRQRLRYRKPRFNNRKRNDGWLAPSIQHKLDTHIKIINEINRMLPISNIIVEVANFDIQKIKNPNIRSEEYQQGEQMGFWNLREYILYRDGHKCQNPNCKNKSKNQILEIHHIKYKSEGGTDVPSNLITLCNKCHTSPNHKKGKFLYDWMMKKKKVKGFKDATFMSMVRWKIINELKTKYQSVNFTYGYMTKNHRIRHAIEKTHYNDAFAIAKELIKYVVRIYGQ

SEQ ID NO: 22904 - protein, 515 aa, unidentified; identical to SEQ ID NO: 17815

SEQ ID NO: 22905 - protein, 500 aa, unidentified
LVWNVQAPWDVYPSPTLCGLCLKVLRGRNGDADKKPIPTLTKDENRPSGRTTGLRAEQAEPAGIRKGDTLKVFVLNMRGKPLMPCSPAKARHMLKAGKAVVVRRTPFTIKLTIATGETKQDVTLGVDAGARHVGISATTEKEEVFASEVALRQDITGLLADRLAFRRARRNRKTRYRAPRFNNRVRSKHKGWLAPSVENRIQAHISRIEAVCRLLPVTKIVIETASFDIQKIRNPEVEGTGYQQGDQLGFWNVREYVLFRDGHICQHCRGRSKDPILNVHHLESRKTGGDAPNNLITLCETCHKAYHAGKIKLKVKRGQSFRAEAFMGIMRWTLLDRVRKAHPGLPVENTYGYLTKHTRITHGLPKTHCVDAYCIAGNLKAVRRGVYLHQRQMRKHNRQIHKFTVLSKRLEDGTKIGYRKLNQSPYLVHGFRLFDKVRCLGQIGFIFGRRSSGYFDVRRLDGVKLSPSISWRKLTLLEKRSTYLTELRKPVSYTHLRAHE

SEQ ID NO: 22906 - protein, 458 aa, unidentified
LTKDENRPSGRTTGLRAEQAEPAGIRKGDTLKVFVLNMRGKPLMPCSPAKARHMLKAGKAFVVRRTPFTIKLTIATGETKQDVTLGVDAGARHVGISATTEKEEVFASEVALRQDITGLLADRLAFRRARRNRKTRYRAPRFNNRVRSKHKGWLAPSVENRIQAHISRIEAVCRLLPVTKIVIETASFDIQKIRNPEVEGTGYQQGDQLGFWNVREYVLFRDGHICQHCRGRSKDPILNVHHLERRKTGGDAPNNLITLCETCHKAYHAGKIKLKVKRGQSFRAEAFMGIMRWTLLDRMRKAHSGLPVENTYGYLTKNTRITLGLPKTHCVDAYCIAGNLKAVRRGVCLHQRQVRKHNRQIHKCTVLSKTLKDGTKSGYRKLNQTPHLVKSFRLFDKVRCLGQIGFIFGRRSSGYFDVRRLDGVKLSPSISWRKLTLLEKRSTYLTELRKEDGASSPV

SEQ ID NO: 22907 - protein, 512 aa, unidentified
MSTVYVLNKDGKPLMPTTRGGHVRHLLKEQKARVVRAKPFTIQLLYETNDVVQPLYLGIDPGRTNIGVAVVKANGTAVFTAHLETRNKEVPKLMQDRKKARRARRTNGRRCRRQRRAKANGTISKKCVKQDTAQSKNPSKRAKEIGIIKRRLPGYKKDVLCIGIKNKEAKYTNRTRPEGWLTPTANQLLQTHINLVRKMQKFLPISDVVLEVNKFAFMRLDNPDIQKWQYQQGPLYQKGSLENAVSEMQEHHCLFCDKPIDHYHHVVPQSENGSNTIANIVGLCAEHHNLVHKDAAWQKKLAEEKVGLNKKYGALSVLNQIIPALTNKLSVLFPKHFFVTAGKSTHDYRAAHGVSKDHWLDAYCIACSVLPSNVCDSNINNHMPYELKQFRRHDRRVLNNENMNRVYTLDNKAVAINRHKATEQEAASLEEFRKEHPNDVCKLKVKEHHPTYRNMNRNYPGSIFLVGKHVHIMQGIVGSKDGKATTYKDSNANSITASKCKFVAKNSGILFV

SEQ ID NO: 22908 - protein, 435 aa, unidentified
MPDTDYIYVLGVDGKPQMPTKRKRHVKRLLNTGKARIACHVPYTIQLLYENTPVLQPVMLAEDPGRTNIGMAILSIKGELLMSAVVETRNREIVRLMNHRRGYRRASRIGERKARQRLAKRFGTMLKAGLIMRKLPKFAADKFITCHCIKNTESRFFNRKHPDGWLTPTSRQLVETHINLMHKIQKYLPVTDIAMEVNRFAFLSLENPSVSGVDFQNGPLKGFDSLHDTVNELQHGKCLLCDKKIEHYHHIVPRSINGSNTIGNIAGLCMECHDKVHKCAAYQKKLNDVKKGLDKKYGALSALNQAVPFICKCLEAEFGREHVSYCTGRDTAKMRSSFGFQKTKDNQMHETDAWCIGILALNKIPNVVPDFGQTYCIRQFRRQDRSLVCAQTERVYKLDGVTIAKNRKKRTEQKTDSLDDWYNRQAGDFIRQKES

SEQ ID NO: 22909 - protein, 419 aa, Moorella sp.; identical to SEQ ID NO: 4784

SEQ ID NO: 22910 - protein, 512 aa, unidentified; identical to SEQ ID NO: 9441

SEQ ID NO: 22911 - protein, 427 aa, unidentified; identical to SEQ ID NO: 3216

SEQ ID NO: 22912 - protein, 430 aa, Beggiatoa sp.; identical to SEQ ID NO: 9043

SEQ ID NO: 22913 - protein, 432 aa, Scytonema sp.
MEGRMSKVLIIDTEKRPLDPIHPAQARQLLRNGKAAIFRRFPFTLILKESRPDAPVQPLRIKIDPGAKITGISVVNDSTGEVVFAAELQHRGFAIRESLTSRRQLRRGRRNRKTQYRQPRFDNRKRPDGWLPPSLMSRVYNIETWVKRLIRFAPITAISQELVRFDTQLMENPNIQGKEYQQGTLAGYETREYLLEKFGRKCAYCDKQNVPLQIEHIYPRAKGGTNRISNLTLSCEKCNIKKGTKDIKNFLKKDPTRLKKIENQAKKPLADTAAVNATRFKLLEVISATGLPVETGSGGLTKFNRTQQELEKTHWIDAAVVGKSTPEKLIIKGVKPLLVKAAGHGTRQCAGINKYGFPTRYRTSKQIHFGFQTGDIIKAVVKSGKKAGTYVGRVLCRASGSFDISMKSGRVQGISHKYCSVIHKKDGYSYGF

SEQ ID NO: 22914 - protein, 415 aa, Bacillus sp.; identical to SEQ ID NO: 16311

SEQ ID NO: 22915 - protein, 463 aa, unidentified; identical to SEQ ID NO: 6734

SEQ ID NO: 22916 - protein, 512 aa, unidentified; identical to SEQ ID NO: 19995

SEQ ID NO: 22917 - protein, 457 aa, unidentified; identical to SEQ ID NO: 4365

SEQ ID NO: 22918 - protein, 418 aa, unidentified
MPCHPARARQLMRKGRAAVYRRYPFTIIIKEREGGDTQPTALKFDPGAKTTGIAVVVDCKRGKRCVFAAEIEHRGSQIKEGLEKRRAIRRSRRHRKTRYRKPRFKNRTKPKGWLPPSLRSRVDNIASWTKKLRSRIPVSSLSMERVRFDAQKLVNPEISGVEYQQGTLFGYEIREYLLEKWGRKCAYCSKKDVPLQIEHMTPKSRGGSNRIGNLTLACEKCNQKKNTKTAEEFGFSGLREKSSKPLRAAAAMNATRNAIYSVLKATGLSLEAGTGGRTKYNRSKQGYAKEHWLDAMCVGESGENVFVEKQHEVLEVKAMGRGSRQMCRVDGYGFPRTKAKSEKRVRGFQTGDIIRAVVPKGKKKGVYEGRVAVRKSGSFNIKQGKQKAVQGIGWKHCKIIQQIDGYSYKNRMGVDTPL

SEQ ID NO: 22919 - protein, 570 aa, unidentified
  source 1..570: note = Candidatus Collierbacteria bacterium
MKQSKQSNKKFKAQALNSKEKSALEILGFQPDLVYQAQESMPKGIATPTGATTTFKITSKDALRDDNSSPGPCKNKTSNALTKAERLAKATERQLTEAQRNLNIVEENIASKATVPSREIARKGIHTQGRVLVIGQDSNPCMPCNPARARKLLKAGKAKIHLYFPFVIQLNYSPTGTQPVQLKGDPGTRTTGICLNILTQRGWRTVWAMHLVHHPDDIRNSLTKRRSQRNGRRSRNTRYRPPRWNNRKRAKGWLAPSLMTNVINLVTWVKRLKKHAPVTQITIEDVKFDTQLMQNPDISGLEYQYGTLHGTDIREHTFWKCNYTCSYCGKKNIPLTVDHIKSQSPRTPDRQAGTNTPSNLTAACKPCNQEKSNYSVEEFAIMRGVKSFPLLKINNEKNLKAVGISNSIRLRIIEETKKATRINPELGSGGRTKFNRENQKYPKTHFIDAACAGESGAKVSLNPNMQIYIVKACSRNARRMQQPDSFGFPKGKAKEFSCIHGVRTGDIGKAVVTKGKNKGTWIGRISIRSTGTFKVGNKDGVNYKKIKVIQRNNGYSYNFAYPPLFQNPKP

SEQ ID NO: 22920 - protein, 417 aa, unidentified
MPCSPAKARLLLKERKAIVKRRTPFTIQLTIATGEAKQPVTLGVDSGYKHIGLSATTEKAELYASEVELRQDITDLLSARLALRRSRRSRKTRYRVPRFDNRVASKRKGWLAPSVENRITAHMSRVEAVMRVLPVTAITVETAAFDTQLLKNPDITGAAYQQGEQLGFWNVREYVLFRDGHVCQHCRGKSKDPILNVHHIESRRTGGDAPNNLITLCETCHKAFHRGEIKLKVRRGKSFKAETFMGIMRRTLFERLKKAHPELNVRNTYGYLTKHKHISYGIAKSHCADAYCIADNLGAKRLEGFFFQKQTRKHNRQIHKLLILKGGLKKKNQAPYEVKGFRLFDKVICKGEEAFIFGRRTSGSFDVRRLDGTRISAGINYKKLRLLEPRTTYLTEFRKEAALPPLHKCRGVCAEFL

SEQ ID NO: 22921 - protein, 424 aa, unidentified; identical to SEQ ID NO: 12629

SEQ ID NO: 22922 - protein, 477 aa, unidentified
MWLNSSEGKEQCCIHGNLGITLGKDSHSLRRGQFCQSLTVTTTRKETTSMYVYVLNQHGEPLMPCSPRKARTMLRDHKATVVRRTPFTIRLLHRSSEYRQDITLGVDAGSKFIGLSACTENKELFAAEVKPRNDVVDLLSTRRELRRSRRNRKTRYRAARFNNRVHSKHKGWLAPSVEVKIQEHITAIKRTCAILPISMVIVETAEFDTQRLKAMLEGKPLPVGTDYQLGEMYDEYNVRQYVLKRDNYTCQCCGIQSTDKAPVKFAVHHKESRHVGGNAPNNLITLCEKCHRRLHAGVITLEEGKRKRGKSFRDAAFMGIMRKTLMRRLRSELSIPVKETYGYITKLLRETHSIQKSHVNDARCIARVPNAQPSDTLYRIRTVRNHNRQLHKANPIKGGIRKRNQAPYEVFGFRLWDKVLFNGQECFITGRRVSGYFALKDFDGKKVHASVSHKVLTVVESATSYLIERRTAVSSRG

SEQ ID NO: 22923 - protein, 515 aa, unidentified
MTVLEERLSKTEYIYVLGFDGKPQMPTRRKRHVLKLLKTGRARIAEDIPFTIRLTYRNAPVLQPVTLAEDPGRTNIGAAVLSPLGDLLFAAVIETRNKEIKKLMTDRQKSRQASRRGERKARQRLAKRYGSMVKSGMVMRKLPMYAADRFVTCKFIRNTQARFCNRKRCPDWITPTVQHLVQTHLNIIRKISRYLPVTDIAFEVNRFAFMHMENPKAMGVDFQNGPLKGYDDVKEAIRTQQHGKCLMCKKPISHFHHIVPRSRGGSDTIQNMAGLCPECHTKVHTDTAFRKDFDEKKSGQLKKYGALSALNQAVPFICKKLLEEYGEEHVHFCRGMDTSLIRTALGFEKTKMNQMHEVDAYCIGLAALEVNEVETPAFDHTFQIRQFRRQDRSIIHHQTGRSYYQGKEKVAQNRKPGFEQKTTALSQWYEEQVRIHGEKEAEKLRSQLRVEKSCRHYNDMDRFLPGAVFLYEGKRYVLSGRITNGKYLRACGQGMKNFPAAECTFIRHNAGLVFI

SEQ ID NO: 22924 - protein, 428 aa, Oscillochloris sp.; identical to SEQ ID NO: 14672

SEQ ID NO: 22925 - protein, 413 aa, unidentified
MTSYAFVLDANGKQLAPTKEQKAWFLIRKKRAALVSKYPMVIQLKKEIQENEICKDEIRCGIDDGGLHVGIALVQKCKTKNKVVFKGTIEQRNDVKHLMEVRRGYRRYHRYHKRYRQARFNNRKSSKREGRIAPSILQKRKATIRVINQLNKWINITNYWLEDVSIDIRVLTDGYKSYRWQYQKSNRLDENIRKATILRDGGKCMECGKSNCRLEVHHIKPKRRNGSNTLDNLITLCESCHQKTEGQEELYMDRYFSLLKSSDNKNLNYAQHVMIGKMWLRKQLSGLGVLYLTSGGDTANKRIDWNIEKSHANDAVCITDLQPDTYDMKEWTMKPMRRQSKAKTDHVLGIKHRDLVEYTFKNGETHRGYVTALYPEQKAINFQSPTKHCKKVNARKCKLLWKYSKIYWFENAS

SEQ ID NO: 22926 - protein, 374 aa, unidentified; identical to SEQ ID NO: 10163

SEQ ID NO: 22927 - protein, 409 aa, unidentified
VVKRFPFVIRLVDRTVEQSEVQPVLIKLDPGSRETGAAVVRDDGKKRHHALAFFVIKHRGGAIRDALKARSAFRRRRRSQNFRCRSPRFLKRVKPKGWLPPSLRHRVETTLSFVRRMCRYLPVSGIATELVKFDSQKLQNPEVSGVKYQQGTLFEYEVREYLLEKFGRKCVYCGAEGVPLNIDHVVPRAKGGSNRVSNLVLACVSCNQKKGARSLEDFLKGKPEVLARVRRELKTPLRDAAAVNATRWVLFNELKATGLPVETGSGALTKLNRHAFGVEKEHWLDALCVGRLNGVVTRKGLNVLEIRCMGRGSRQRTRLTKYGFPRGYLMRQKCVHGFATGDMVEANVPKGKKAGLWRGRVAVRVSGSFNIQTPKGVIQGVGWKHCRLISHNDGYGYAWLGHAPHSSPA

SEQ ID NO: 22928 - protein, 467 aa, Clostridium sp.; identical to SEQ ID NO: 14886

SEQ ID NO: 22929 - protein, 490 aa, unidentified; identical to SEQ ID NO: 9939

SEQ ID NO: 22930 - protein, 375 aa, unidentified
MVYVQDINGKPMMPTTRHGKVRRLLKDKKAVVVNLCPFTIKLMYVTSDYKQEIVLGVDAGTKHVGLSATTKSKELYSSEVILRNDIVDLLSTRRELRRARRNRLRYRKPRFNNRIKSKRPGWTAPSVKYKIDAHIRVIDNVCSILPIFRIVIEVAQFDTQKIKNPNISGKEYQEGDQLGFWNTREYVLARDGHKCQYCKGKSKDKILNVHHLESRKTGGDSPSNLITLCETCHKEYHKGNIDLKIKRRSSLRDAAVMGIMKWRLYEELKSKYDNISMTFGYVTKYNRIKHGIEKSHVFDAFVISKNFDAIRLCYYYKVRLASRHNRQIHKQKIPKGGIKRPNQSPFEVFGFRLFDRVMFENSYYFILARRKTGSF

SEQ ID NO: 22931 - protein, 462 aa, unidentified; identical to SEQ ID NO: 9356

SEQ ID NO: 22932 - protein, 327 aa, unidentified
RAKYRRNRRNRKTRYRKARWLNRASSIKKDRFSPTMQSKLHSHVREIEYIQSILPVTEMVFETGQFDMHLMKNPSLANPKVRPWGYQKGANYGFENTKAMVLNRDNYTCQCCKGKHKDSKLEVHHIVFRSQGGSDEESNLLTLCHTCHKDLHSGKINPKLSGKVKGNLKYATQMNSIRKQLFRCYPNAIETFGYVTKVNRLHLGVAKEHYYDACTIATQGNAFNVKSNLYKKKCVSDGDFQKTKGIHSEQPIVTDKICGFRKFDKVRYFGNDYFIKGRMSTGYAILMDIDGNKIDFSTMPRGYKTPKLSNCKRITARSTVMTQVKVV

SEQ ID NO: 22933 - protein, 413 aa, unidentified; identical to SEQ ID NO: 5477

SEQ ID NO: 22934 - protein, 504 aa, unidentified; identical to SEQ ID NO: 13658

SEQ ID NO: 22935 - protein, 372 aa, Anabaena sp.
LFAQRAVGISKLYLEIRIGQTDRKQIMSNFVFLIDANKTPLNPIHPSHASKLLDSGKAAVFRRYPFVLIMNRVVENIVTYPINLKIDPGSKFTGISLVNNKEEVIWGMELQHRGAVIKSELETRSWVRRSRRNRHTRYRKPRFLNRKRTINWLAPSLKHRVLTTNTWVKRLIKYAPITAITQELVRFDLQQLENPEISGIEYQQGELQGYEVREYLLEKWERKCSYCDAKDIPLQVEHIQPKAKGGSNRISNLCLSCEKCNQKKGTQDIGKFLAKKPELLKRIKSQSKRPLKDAVAINSTRWDLFQTLKETGLPITTASGGRTKFNRRKLNLPKEHWIDAACVGVVKNLNILTTNIFKLTLSGLKTLRFFNQ

SEQ ID NO: 22936 - protein, 415 aa, Parasutterella sp.; identical to SEQ ID NO: 6468

SEQ ID NO: 22937 - protein, 475 aa, unidentified; identical to SEQ ID NO: 5744

SEQ ID NO: 22938 - protein, 475 aa, unidentified
MVAVVTSTGKPLMPTSAYRARKLLKKGRAVIFKYRPYFTIQLVDRADGEVQEVEYKSDTGSVHVGISVCTEKKELLSEQRDLLENEPEHHNDRKKNRRTRRNRKRYRKPRFDNRKKKPQEGHEKWLPPTLLHKMEVQVRLFREFCRVVPVTSACFEMGKFDTQALKAVSKGEPVPEGEGYQKGERYGTDTLRAAVFLRDGHTCRFCGRSVKDGAILHVHHVGYWKGDRTNRPANLASACEQCHTPANHGKNGILYGKEPEFKTLKDASYMTSVRWIMLDEIKKAAPGVQVSVTYGVTTKKKRQELHLPKSHVNDAFSMASFHPKKRSDTEYWKKIPRHDRVLQKFYDAVYLDTRDGSEKKGSELSNGRISRNHKKDSENLHQYRVHKVSKGHNSIRRGASSLKPGSIVMYRGEKMTVHGTHTRYVKGKDGKTAKKVNVQFTCPASDGKKSASLEKCTPVSRVYNTGWKRYWPDKK

SEQ ID NO: 22939 - protein, 439 aa, unidentified; identical to SEQ ID NO: 3280

SEQ ID NO: 22940 - protein, 477 aa, unidentified; identical to SEQ ID NO: 14838

SEQ ID NO: 22941 - protein, 420 aa, unidentified; identical to SEQ ID NO: 12109

SEQ ID NO: 22942 - protein, 374 aa, unidentified
MVIQLKKEIPENKICKDEIRCGIDDGGLHVGIALVQKCKTKNKVVFKGTIEQRNDVKHLMEVRRNYRRYHRYHKRYRQARFDNRKSSKRKGRIAPSILQKRQATIRVINRLNKWINITNYWLEDVSVDIRALTDGYQSYRWQYQKSNRLDENIRKAAILRDGSKCMECGRANCRLEVHHIKPRRRNGSNTLDNLITLCESCHQKTEGQEELYMDRYFSLLKSSDNKNLNYAQHVMIGKKWLRKQLSNLGVLYLTNGGDTANKRIDWNVEKSHANDAVCITDLQPDTYDMKEWAIKPMRRKSKAKTDNVLGIRHRDLVEYTFKNGETHRGYVTALYPEQKAINFQSPTKHCKKVNARKCKLLWKYSKIYWFENAS

SEQ ID NO: 22943 - protein, 418 aa, unidentified; identical to SEQ ID NO: 20125

SEQ ID NO: 22944 - protein, 443 aa, Anoxybacillus sp.; identical to SEQ ID NO: 2800

SEQ ID NO: 22945 - protein, 395 aa, unidentified
MMPTTRHGKVRRLLKDKKAIVVNLCPFTIKLMYVTSDYKQEIVLGVDAGTKHVGLSATTKSKELYSSEVILRNDIVDLLSTRRELRRTRRNRLRYRKPRFNNRIKSKRPGWVAPSVKYKVDAHIRVIENICSILPISRIVIEVAQFDTQKIKNPEILGKEYQEGDQLEFWNTREYVLARDGHKCQYCKGKSKDKILNVHHLESRKTGGDSPSNLITLCETCHKEYHKGNIDLKIKRGSSLRDAAVMGIMKWKLYEELRSRYDRVSMTFGYITKHNRIKYGIEKSHTSDAFVISKNINAKRIGCQYLKRLIRRHNRQIHKMKILKGGKKKNNQAPFEVFGFRLFDKVLYNNKICFVYGRRKSGSFNIRDFNGENSKDVSRKKFKLIRGKRHPIILK

SEQ ID NO: 22946 - protein, 423 aa, unidentified
LNMRGQPLMPCSPAKARHLLMDKKAVVKRRTPFTLQLTIATGETKQDVTLGVDAGAKHIGLSASTEKEEVFASEVELRQDITGLLAARLAFRRARRHRKTRYRAPRFLNRVHSKHMGWLAPSVENRIQAHMSRIDAICGLLPVTKIVIETASFDIQKIKNPDVEGTDYQQGDQLGFWNVREYVLFRDGHVCQHCRGRSKDKVLNVHHLESRQTGGDAPNNLITLCETCHKAYHAGKIKLKVKRGQSFRAEAFMGIMRWTMLDRVRKAHPDLPVENTYGYLTKNTRITLGLPKTHCIDAYCIAGNLNARRRGVYLYERQMRKHNRQIHKCKVLSKTLKDGTKVGYRKLNQTPYLVKNFRLFDKVRCFGQTGFIFGRRTSGHFDVRTLNRTRLSDCVNSKKLTLLEKRRTFLTELRKEDGASSPV

SEQ ID NO: 22947 - protein, 339 aa, unidentified
LLSARRALRQSRRSRNTRYRAPRFDNRIRTKRKGWLAPTVENRINVHLSRIETVLRLLPVTKITVETASFDTQLLKNPDIAGKEYQEGEQLGFWNVREYVLFRDGHVCQHCHGRSKDPVLNVHHLESRRTGGDSPGNLITLCETCHKALHRGEIKLKAKRGRSFRAETFMGIMRWGVLNRLKASHPKLEVHNTYGYRTKHARIANGIAKSHCADAFCIAGNFGAKRLGEFFFQKQTRRNNRQIHKLSILKGGIRKRNQAPFEVNGFRLFDKVACQGEEGFIFGRRSSGYFDVRKLDGTCISAGISYKKLHLLEKRRTYLTEIRKEEALPPPPEGRGLRA

SEQ ID NO: 22948 - protein, 386 aa, Alistipes sp.
QTIATGETKQPVSLGVDAGYKHVGLSASTEKAELYASEVELRQDITDLLSARRALRQSRRNRKTRYRAPRFDNRIRTKRKGWLAPSVENRINAHLSRIEAVLRLLPVTKITVETASFDMQLLKNSDIAGKEYQEGEQLGFWNVREYVLFRDGHVCQHCHGRSKDPVLNVHHLESRRTGGDSPGNLITLCETCHKALHRGEIKLKAKRGQSFRAEAFMGIMRWEVLNRLKASHPELEVHNTYGYRTKHARIANGIAKSHCADAFCIAGNLGAKRLCEFFFQKQTRRNNRQIHKLSILKGGIRKRNQVPFEVKGFRLFDKVAYKGEEGFIFGRRSSGYFDVRKLDGTHISAGISYKKLRLLEKRRTYLTEIRKEEALPPLPEGRGLRA

SEQ ID NO: 22949 - protein, 533 aa, unidentified
MSTVYVLNKDGKPLMPTTRGGHVRHLLKEQKARVVRAKPFTIQLLYETNDVVQPLYLGIDPGRTNIGVAVVKANGTAVFTAHLETRNKGVPKLMQDRKKARRARRTNGRRCRRQRRAKANGTISKKCVKQDTAQSKNPSKRAKEIGIIKRRLPGYKKDVLCIGIKNKEAKYTNRTRPEGWLTPTANQLLQTHINLVRKMQKFLPISDVVLEVNKFAFMRLDNPDIQKWQYQQGPLYQKGSLENAVSEMQEHHCLFCDKPIDHYHHVVPQSENGSNTIANIVGLCAEHHNLVHKDAAWQKKLAEEKVGLNKKYGALSVLNQIIPALTNKLSVLFPKHFFVTAGKSTHDYRAAHGVSKDHWLDAYCIACSVLPSNVCDSNINNHVPYELKQFRRHDRRTLHKENMSRVYTLNGKAVATNRHKAIKQTTDSLEEFRQNYPDDVYKLKVKEHHPAYRNLNRNYPGSVFLVGKQAHVMQGIASSKDGKTTKYNDTNATTITAGKCKFVAKNSGILFVQCKFRKALSDGTTKKLQYPVR

SEQ ID NO: 22950 - protein, 451 aa, unidentified; identical to SEQ ID NO: 7445

SEQ ID NO: 22951 - protein, 420 aa, unidentified; identical to SEQ ID NO: 5988

SEQ ID NO: 22952 - protein, 423 aa, unidentified; identical to SEQ ID NO: 3576

SEQ ID NO: 22953 - protein, 509 aa, unidentified
TPIKSSAASDVYKRQVLDVDGKPLMPTCRFSKVRRMLKSDQAKAVDTLPFTIQLTYRTKTRILQPVTLGQDPGRTNIGVAAVRSDGKELGRFHCITWNKEIPKLMTDRMAVRRASRRGERLVRKRLARKLHTTAKHLEGRMLPGCDKPLPVKDIINTESRFNNRLRPEGWLTPTATQLLRTHINLFVRLAKILPVTDVAIELNKFAFMQLDNPEMKKREIDFCHGLLYGTGGLEATVKEQQNGKCLLCGKEPISHYHHIVLRSRRGSNTIANIAGLCPKCHEWVHKDTDAAKRLADIKTGLLKKYGGTSVLNQIIPKLVTKLSELFPDHLHVTNGWNTKEFREKHHLEKDHDVDAYCIACSHLKPEETLVETEPFEILQFRKHNRAIIHHQTERTYKLDGVTVAKNRKKRMEQKTDSLEDWYVDMAKEHGKTQADAMRSRLTVIKSTRYYNTPGRMMPGTVFLYEGKRYVMTGQITNGKYYRAYDQEKRNFPAVKVRILTKNTGLVFVA

SEQ ID NO: 22954 - protein, 432 aa, unidentified
MLIYVLSKDKEPLMPTKRCGKVRHLLKDGKARVVYRCPFTIQLLYETNTYTQDLTLGGDTGSGDAAFGVSTNDVDENGRKHIKYKSTVEIRNDIKSKMDRRRELRRTRRNRLRYRPARFKNRKNSKRKDRFSPTMTSKIDSHVKEIELVKKILPITNITLEVGQFDTQLMANPQLANPKVKLWGYQKGPNYGFANTKARVLNRDNYTCQYCKTKKKGTRLEVHHIVYRSHNGSDDADNLITLCHDCHTALHNGEITLKQKGKKNGTLNHATQMNSIRKQLLKRYPEAVETFGYVTKENRQLLGLPKDHYIDACVIATGGVPFVDDTDVLYCKKSVAKGDYQQTKGQRSEIKIPTGKIQGFKKYDKVLYLGKEYFIKGRMSSGYCILMDIDGKKVDFSDQPKGFKTPKLCNLKRIGARKSCLVTAKAVTLNTP

SEQ ID NO: 22955 - protein, 536 aa, unidentified; identical to SEQ ID NO: 18595

SEQ ID NO: 22956 - protein, 441 aa, unidentified
MSKVFVVDANKQPLNPVHPGYARLLLKQGKAAVLRRYPFVLILHAEVEMPQLEPLRVKLDPGSKTTGLALVNDATGEVIFAAEIMHRGAEIKQALDGRRGVRRGRRQRDTRYRKARFLNRRRPKGWLPPSLESRVCNVVTWVKRLMRLCPLAAISQELVRFDLQEMETPEIAGIAYQQGTLAGYEAREYLLEKWGRKCCYCGATHLPLQIEHIQCRAKGGSDRIANLCLACEPCNLKKGTLDIQVFLAKKPDLLKRILVQAKAPLKDAAAVNSTRWALYERLQALGLPIECATGGRTKFNRVSRGLEKTHWHDAACVGASTPEILQIQGLVPLLITAQGYGCRQMCNVNEIGFPCSKPKGAKKVKGFQTGDIVRAIVTSGTKQGTYMGRVLVRATGSFDIRTKHGRVQGISHRFCTPIHRCDGYSYRQGAGHAAHPTQSTR

SEQ ID NO: 22957 - protein, 449 aa, unidentified
LAEDPGRTNIGAAVLSPLGDLLFAAVIETRNKEIKKLMADRQKSRQASRRGERKARQRLAKRYGSMVKSGMVMRKLPMYAADKFVICKFIRNTQARFCNRKRCPDWITPTVQHLVQTHLNIIRKISRYLPVTDIAFEVNRFAFMHMENPEAMGVDFQNGPLKGYGDVKEAIRTQQHGKCLMCKKPISHFHHIVPRSRGGSDTIQNLAGLCPECHTKVHTDTAFRKDFDEKKSGQLKKYGALSALNQAVPFICKKLLEEYGEEHVHFCRGLDTSLIRTAFGFEKTKKNQMHEVDAYCIGLAALEVNEVETPAFDHTFQIRQFRRQDRSIIHHQTGRSYYQGKEKVAQNRKPGFEQKTTALSQWYKEQIRIHGEKEAEKLRSQLRVEKSCRHYNDMDRFLPGAVFLYEGKRYVLSGRITNGKYLRACGQGMKNFPAAECTFIRHNAGLVFI

SEQ ID NO: 22958 - protein, 465 aa, unidentified
MSTCVCVLSKNGERLMPTIRLGKVRHLLKDGKAKIVKHHPFTIQLLYDSKTNTQPIEICEDVGYNYIGISVKSQSHEYVSAQYNTLQDEKACHDSCRKLRRTRRNRLRYRKPRFDNRKRGEGWLAPSLRHKKELNVNVVKMYCAVMPITHATVEVGSFDTMLVKAIQEGKAIPEGADYQKGPRYNLATLREAVFYRDNYTCQVCGRKVADGAILHMHHMFYWKGRHGDSLNELLTVCEKCHTPANHQKGGKLYGFGENVKFADLSGAAFMNTVRWQIVNELYAAFGKDFVTVTYGAMTKEKRIALRLEKSHNNDAYAMGEFHPNCRCTFEHYEKVRRNNRILEKFYDSRYIDIRTGEIATGKELFNGRINRNHKKDSENLHRYRGKRTYAGHRALLRKKVNLNPGDLVSLNGEVLVVHSTHTNKKGAVNVEFKTPGKSGQKSASLKKLKIVKAADSMHSAWEKIS

SEQ ID NO: 22959 - protein, 419 aa, unidentified; identical to SEQ ID NO: 3670

SEQ ID NO: 22960 - protein, 440 aa, unidentified; identical to SEQ ID NO: 14503

SEQ ID NO: 22961 - protein, 320 aa, unidentified
MVYVLANDGQPLMPTERHGKVCRMLKSGIAKVVKKCPFTIQLQYESERNVQPVALGIDAGSKHVGVSATTKAKVLYESDVELRDDIVKLLATRRQLRRRRRSRKTRYRPARFDNRRRKEGWLAPSIRQKIESHLTVVANVCKILPVSQIIVETASFDIQKIKNPDIQGIEYQQGEQMDFWNIREYVLFRDGHTCQCCKGKSKDKVLNVHHIESRKTGGNAPNNLITLCETCHKGYHNGTVTLPKNIKRGMKFKDAAFMGIMRWTFYNTLKEQYEPDIPVHYTYGYITKNTRINHNLPKGHCIDARCISGNPDAVSDGTYY

SEQ ID NO: 22962 - protein, 432 aa, unidentified
MSSARYWHEEKFSERKVSEMTDYAFILDANGKQLAPTKEQKAWFLIRRKRATLVSKYPLVIQLKKKIPDNEICKDEIRCGIDDGGLHAGIALVQKCQTRNKVVFKGTIEQRNDVKHLMDVRRGYRSYHRYHKRYRPARFNNRSSSKREERIAPSILQKRQATIRVINQLNRWINITNYWLEDVAIDIRALTDGYKPYRWQYQKSNRLDENIRKAVILRDGCRCMECGKSNCRLEVHHIKPRRLKGSSTLGNLITLCTKCHQKTEGVEELYMDRYFALLNSSDNRNLDYAQHVMIGKQWLREQLSNLGMLYLTNGGDTANKRIDWDITKSHSNDAICITDLRPDTCEIKEWVIKPMRRQSKAKTNNVLGIKHRDLVEYTFRNGETHRGYVTALYPEQNAINFQSPAKHCKKVNAGKCKVLWKYSKIYWLDNVS

SEQ ID NO: 22963 - protein, 489 aa, unidentified; identical to SEQ ID NO: 5672

SEQ ID NO: 22964 - protein, 522 aa, unidentified; identical to SEQ ID NO: 11042

SEQ ID NO: 22965 - protein, 409 aa, unidentified
MVYVINKQGQALMPTERFGKVRRLLKNGLAHVVCRIPFTIQLDYDTTDYTQPISLGVDAGSKHIGISATTSEKELYAADVELRNDIVDKLSTRREQRRTRRSRLRYRKARFNNRISSKRKGWLAPSVENKIQTHLTVVEKIHKFLPITNIVVETASFDIQKIKNPSISNEEYQQGEQLDFFNVREYILFRDGHTCQHCKGKSKDKVLNVHHIESRKTGGDSPNNLITLCETCHKAYHRGEFELNVKRGKSFRDAAFMGIMRWNLYDRLKHIYPNVSMTFGYITKNTRITNNLPKEHYVDARCISGNPVAKPLGYYFYQKKVRCQNRQIHKVNFLKGGRKKLNQAPFLVKGFRLFDLVEYQKDLYYIFGRRDSGFFDIRKLDGTKVNKGSISCKHLRLIDKRKSILTERR

SEQ ID NO: 22966 - protein, 266 aa, unidentified
MVYVQDINGKPMMPTTRYGKVRRLLKDKKAVVVNLCPFTIKLTYVTSDYKQEIVLGVDAGTKHVGLSATTKSKELYSSEVILRNDIVDLLSTRRELRKTRRNRLRYRKPRFDNRVKSERPGWVSPSVKYKIDAHIRVVDNVCSILPISRIVIEVAQFDTQKIKNPEISGKEYQEGNQLGFWNVREYVLARDGHKCQNCKGKSKDKILNVHHIESRKTGGDSPSNLITLCETCHKEYHKGNIDLKIRRGKSLRDAAVMGIIKFLLYH

SEQ ID NO: 22967 - protein, 480 aa, unidentified; identical to SEQ ID NO: 2726

SEQ ID NO: 22968 - protein, 406 aa, unidentified; identical to SEQ ID NO: 2874

SEQ ID NO: 22969 - protein, 419 aa, unidentified; identical to SEQ ID NO: 3927

SEQ ID NO: 22970 - protein, 414 aa, unidentified
MPCSPAKARLLLKEKKAIVKRRTPFTIQLTIATGETKQPVSLGVDAGYKHVGLSASTEKAELYASEVELRQDITDLLSARRALRQSRRNCKTRYRAPRFDNRIRTKRKGWLAPSVENRINAHLSRIEAVLRLLPVTKITVETASFDMQLLKNPDIAGKEYQEGEQLGFWNVREYVLFRDRHVCQHCYGRSKDPVLNVHHLESRRTGGDSPGNLITLCETCHKALHRGEITLKAKRGQSFRAEAFMGIMRWEVLNRLKASHPELEVNNTYGYRTKHARIANDIAKSHCADAFCIAGNLGAERLGEFFFQKQTRRNNRQIHKLSILKGGIRKRNQAPFEVKGFRLFDKVACKGEEGFIFGRRSSGFFDVRKLDGTRISAGISYKKLHLLEKRRTYLTEIRKEEALPPLPEGRGLRA

SEQ ID NO: 22971 - protein, 455 aa, unidentified
YPLTALNKQKTIRKDFVKRMTKTLTTQTTQACVLDRQGKPLMPTTRLGKVYRLLKTQKAHIVSYEPFTIQLDYQPDTQVIQPMTLGVDSGAIHSGYSVANEHREYYSAEVIARNDISNRLSERHMYRQTRRSRKTRYRKPRFKNRKNKKKGWLPPSLEQKVAAQANEIDHIHRYFPIETIIVETAEFDIQKIKNPDISGIEYQQGTLQGYNIRNYLLEKHGRKCFYCGKAVSDFEVEHMLPKSKGGSNRIDNLTLSCHDCNEKKGTLTAEEFIKQTLPVKKAASKLKQLPNEKRLFKYMAHMNATRWALYDAIKERYPNVKMTYGYITKYNRIQAGLPKTHHIDAKCITGFSTVPSMSQTVVKVKMRRHNRQLHRATFSKGHVRKAASLPTTVFGFQLYDLVLFNNHRYFIKGRRSSGAFALVSVEGLKNEERMYKKLTVLAHTNAYLTNRYVNA

SEQ ID NO: 22972 - protein, 426 aa, unidentified; identical to SEQ ID NO: 3604
  source 1..426: note = Cyanobacteria bacterium UBA11159

SEQ ID NO: 22973 - protein, 449 aa, Allochromatium sp.
MAVFVLDRQKTPLMPCTEKRARLLLERGRAVVVRLAPFTIRLKDRIGGAVQPLRLKLDPGSRVTGLALVRESETCDADTGAVERLEHGLWFGELVHRGQAIREALTSRRHYRRARRSRKTRYRAPRFLNRTRRDGWLPPSLQHRLDTTVNWVQRLHRLAPITALSQELVRFDTQALQNPEISGVEYQQGELAGYEVREYLLEKWRRTCAYCGATHVPLEIEHIVPRSRGGSDRVSNLTLACRACNQRKGNRSIEDFLQRQTVLLHQIQAQAKAPLQDAAAVNATRWALFAALTATGLPVETASGGRTKYNRTRLDIPKTHALDALCVGAVDQVRDWNRPVLAIRATGRGAYSRTRTSNNGFPRGYLMREKRIHGFQTGDWVRAEVPTGKKAGVHVGRVAVRQTGSFNIQTQAGTVQGISYRHCRLLQRADGYGYTFQPKPKMEDARRAA

SEQ ID NO: 22974 - protein, 418 aa, unidentified; identical to SEQ ID NO: 15678

SEQ ID NO: 22975 - protein, 512 aa, unidentified; identical to SEQ ID NO: 7502

SEQ ID NO: 22976 - protein, 500 aa, Erysipelotrichaceae sp.
LLVYVLNRHGDPLMPCKPCKAKLLLKQGKAKVIKRTPFTIRLLFGSSGYRQNVNLGIDAGSKHIGVSATTEDRVLYEADAELRNDIVELISTRREARHVRRNRKTRYRAPRFDNRRRPEGWLAPSVKQKVDCHIKLIADVHKILPISKMIIETASFDTQLLKATLEGKPLPQGTDYQSGEQLGFWNTREYVLFRDNHECQCCHGRSKDPVLNVHHIESRKTGGDSPDNLITLCETCHTGYHKGTVKLPAGIKRGMKFNDAAFMGIMRWSVYNRLKDLYPYVSLTYGYKTKNTRIRAGLPKEHCIDARCISGNPSALSDGIVYFQRKMRCHNRQIHKFKVNRGGLRKLNQAPYLVKGFRLWDRVLYNSEKCFIQGRRSSGFFQLKKLDGTLVSASASCKKLRLVETGKHFITERRRAIPPRPAEDGASLPINDEKREIMAIDINQIKGFQLTHTIKGRSTTTTFAKKDFSLFKEWVNICKENGYEYDVSLIKEDGSIEPIH

SEQ ID NO: 22977 - protein, 473 aa, unidentified
MTMVYVQNKDGKPLMPTTRYCYVRLLLKEKKARVVSRTPFTIRLNYDTPDVTQDLILGVDPGRTNIGVAVVKEDGQCVFSAHLETRNKDVPLLMKKRAAFRRNHRTLDRRRKRQRRAKAAGTTIAEGSVERLLPGYEKPIVCNHIRNKEARFNNRSRPAGWLTPTANHLLQTHINLIAKVAKFLPITKVVIELNRFAFMAMDNPNIRRWEYQQGPLYGLGSVEDAVYAQQDGHCLFCEKPIDHYHHVVPRHKGGSETLANRCGLCARHHDLVHTDKSWAEKLVTRKGGMNKKYHALSVLNQIIPHLIEHLGSETPYEAYATDGKSTKGFRIAKNVPKEHYTDAYCIACSILDTNIEVSAPTSPFELKQFRRHDRQACIRQMVDRKYLLDGKVVATNRHKAIEQKSDSLQEFREAYGSAAVSQLTVKPHPPQYKDMTRIMPGAVMDFNGTIGVMQSSIVGRVYKSTKGYKAAPR

SEQ ID NO: 22978 - protein, 475 aa, Streptomyces sp.; identical to SEQ ID NO: 22107

SEQ ID NO: 22979 - protein, 442 aa, unidentified
MSTSVFVLDKKHRPLMPCRPARARRLLRVGRARVVKRFPFVIRLVDRTVEQSEVQPVLIKLDPGSRETGAAVVRDDEKKRHHALAFFVIKHRGGAIRDALKARSAFRRRRRSQNFRCRSPRFLNRVKPKGWLPPSLRHRVETTLSFVRRMCRYLPVSGIATELVKFDSQKLQTPEVSGIEYQQGTLFEYEVREYLLEKFGRKCVYCGAEGVPLNIDHVVPRAKGGSNRVSNLVLACMSCNQKKGARSLEDFLKGKPKVLARVRRELKTPLRDAAAVNATRWVLFNELKATGLPVETGSGALTKLNRHAFGVEKEHWLDALCVGRLNGVVTRKGLNVLEIRCMGRGSRQRTRLTKYGFPRGYLMRQKCVHGFATGDMVEANVPKGKKAGLWRGRVAVRVSGSFNIQTPKGVIQGVGWKHCRLISHNDGYGYAWLGHAPHSSPA

SEQ ID NO: 22980 - protein, 456 aa, unidentified
MNTCVCVLSNNGERLMPTFRLSKVRRLLKDGKAKIVKHHPFTIQLLYDSKTNTQPIEICEDVGYNYIGISAKSKSREYVSAQYDTLQDEKEHHDDCRKMRRSRRNRLRYRKPRFDNRKRDEGWLAPSLEHKKQLNISLIERYVSVIPITHATVEVGSFDTMLLQSIQKGEAKPEGADYQKGPRYNLATLREAVFYRDNYTCQVCKRKITDGAILHMHHMFYWKGRHGYQLDELVTACEKCHTPANHQKGGKLFGFGKDKKFANLTGAAFMNAIRWQIVNALYATFGKEFVTITYGAMTKEKRIALQLEKSHNNDAYAMGKLHPSRRCTFVHYEKIKRNNRVLEKFYDATYIDARTGNKAKGKELFNGRISRDHKKDSENLHKYRNKKVSRGRRSIRRQRYAIQPYDTVRLEGKTYITSGCHNKGTRLLIPVNGKSKSVAISKVQVVCHAGAWIQII

SEQ ID NO: 22981 - protein, 406 aa, unidentified; identical to SEQ ID NO: 20530

SEQ ID NO: 22982 - protein, 472 aa, unidentified; identical to SEQ ID NO: 8020

SEQ ID NO: 22983 - protein, 323 aa, unidentified
TRYRAPRFDNRIRTKRKGWLAPSVENRINAHLSRIETVIRLLPVTKITVETTSFDMQLLKNSDIAGKEYQESEQLGFWNVREYVLFRDGHVCQHCHGRSKDPVLNVHHLESRRTGGDSPGNLITLCETCHKALHRGEITLKAKRGQSFRAETFMGIMRWEVLDRLKASHSKLEVQNTYGYRTKHARISNGIAKSHCADAFCIAGNLGAERLGEFFFQKQTRRNNRQIHKLSILKGGIRKRNQAPFEVNGFRLFDKVACKGEEGFIFGRRSSGYFDVRKLNGTHISAGISCKKLRLLEKRQTYLTEIRKEKALPPLPEGRGLRA

SEQ ID NO: 22984 - protein, 441 aa, unidentified
MTKMATQKVTQVCVLDQNGQPLMPTQRLGKVYRLLKTKKAHIVAYEPFTIKLNYEPKTHIIQPMTLGVDSGAIHSGYSLANEHREYYSAEVIARDNISKNISDKRMYRRNRRSRKTRYRKPRFNNRKNKGKGWIPPSLEQKVTVQVNEIKHLHQYFPIKDIIIEVAEFDIQKIENPEISGKEYQQGTLQGYNIRNYLLEKYNHKCFYCDKEVSTFEVEHMIPRARRGSNRIDNLTLACHDCNQKKGTLTAEEFIKQTLTPQKAAQKIRQIPKMKQLLKYMAHMNATRWVLYNTIKETYESVSLTYGYITKHNRINACLPKAHHIDAKCITGFSTVPSFDITVVKTKMRRHNRQLHRATFSKGHKRRAATLSKYVHGFQLYDIVLFNNHRYYIKSRRSFGSFKLASLEGLKDEERSYKKLTFLTHTNAYLTNHYVNDKSING

SEQ ID NO: 22985 - protein, 476 aa, unidentified; identical to SEQ ID NO: 13038

SEQ ID NO: 22986 - protein, 470 aa, unidentified; identical to SEQ ID NO: 2825

SEQ ID NO: 22987 - protein, 427 aa, Akkermansia sp.; identical to SEQ ID NO: 22170

SEQ ID NO: 22988 - protein, 426 aa, unidentified; identical to SEQ ID NO: 3614

SEQ ID NO: 22989 - protein, 420 aa, Lachnoclostridium sp.
  source 1..420: note = isolate UBA7153
MIMVYVLNKNGIPLMPTKRHGKVRRMLKNGQAKVVKRCPFTIQLLYDTTNYTQQINLGIDAGSKHIGICAATEKEELYSADIELRKDVVELLSTRRENRRTRRNRKTRYRKARFNNRKKGKGWVAPSIKQKIQCHLQIVKNIHQILPITKIIVETASFDIQKIKSPKIQGKEYQQGEQLDFWNVREYVLFRDNHVCQCCKGESRDNILNVHHIESRKTGGDAPNNLITLCKTCHSGYHKKTIALPETIHRGMSFKDAAFMGIMRWSFYEELKKEYTYVSMTYGYITKNTRINHHLPKSHYIDARCIAGNPDAVPLGYYFYQKKIRCHNRQIHKVNFLKGGKKKRSQASYTIKGFRLFDKVKYKKEIGFIFGRRSSGYFDLRKLNGEVIHRSASYKKIRLLETRKTFLIERRMQDARIATT

SEQ ID NO: 22990 - protein, 531 aa, unidentified; identical to SEQ ID NO: 2367

SEQ ID NO: 22991 - protein, 469 aa, unidentified; identical to SEQ ID NO: 3488

SEQ ID NO: 22992 - protein, 413 aa, unidentified
MTNYAFVLDANGKQLSPTKEQKAWFLIRKKRAILISKYPMVIQLNREILDDKVCKDEIRCGIDDGGLHVGVALVQKCKTKNKTIFKGTMEQRNDVKYLMEVRKGHRCHHRYYKRYRQARYNNRISSKRKGRVAPSILQKKQAIIRVINQLNKWINITNYWLEDVAIDIRALTDGYNPYRWQYQKSNRLDENIRKAVILRDGCKCKECGKSKCRLEVHHIKPRRLNGSNTLDNLITLCEKCHQNTEGREELFMKKYFSLLNSSDNKNLNYASHVMIGKNWLREQLSNFGILYLTNGGDTGNKRIDWNIGKSHCNDAVCITNLNPDTCDVKEWIMKPMRRQSKAKTDNVLGIKHKDLVEYTYKNGETHRGYVTALYPKQEALNFQSPRKHCKKVNAKKCRLLWKYQKIYWLESET

SEQ ID NO: 22993 - protein, 428 aa, unidentified
KVYVINKHGRPLMPCSPAKARHLLDEGKAKVKKRTPFTIQLIYGSSGYTQEVILGVDAGSKTIGLSASAETEELLSAEVKPRNDVVDLLSTRREFRRARRNRKTRYRKPRFDNRVRSKHKGWLAPSVEVKIQEHITSIKRVCRILPVSKVVIETAEFDLQLLKAIADGKPVPQGEDYQKGEMYGHYNVRQYVLWRDDYTCQCCGAHATKKKEVRLHVHHLESRKVGGDAPDNQVTLCESCHEKLHKGLIAEKDFKKRKRRSTRDVTFMGIMRKTLMQRLCSELPIHVVETRGYITKATREKLLVLSKSHINDALAIAQGKHGFNVGYLPGILQIDMIYTIRPVRHHNRQLHKATILKGGIRKSNQTGKYVFGYRLFDKVQFNGQDCFIWGRRTTGIFTIKTINGKMIKDGISFKKLKPVEKSTSYLIA

SEQ ID NO: 22994 - protein, 416 aa, unidentified; identical to SEQ ID NO: 10554

SEQ ID NO: 22995 - protein, 443 aa, unidentified
LTKDENRPSGRTTGLRAEQAEPAGIRKGDTLKVFVLNMRGKPLMPCSPAKARHMLKAGKAVVVRRTPFTIKLTIATGETKQDVTLGVDAGARHVGISATTEKEEVFASEVALRQDITGLLADRLAFRRARRNRKTRYRAPRFNNRVRSKHKGWLAPSVENRIQAHISRIEAVCRLLPVTKIVIETASFDIQKIRNPEVEGTGYQQGDQLGFWNVREYVLFRDGHICQHCRGRSKDPILNVHHLESRKTGGDAPNNLITLCETCHKAYHAGKIKLKVKRGQSFRAEAFMGIMRWTLLDRVRKTHPKLPVENTYGYLTKHKRIALGLPKTHCADAFCIAGNLKALRRGDFLFQQQTRKHNRQIHRCSILKGGVRKLNQAPFLVKGFRLFDKVRIGGQIGFVFGRRVRGTFNIRRLDKTVIGTDINCKKLSLLETRKTFLTELRKE

SEQ ID NO: 22996 - protein, 413 aa, unidentified; identical to SEQ ID NO: 3620

SEQ ID NO: 22997 - protein, 455 aa, unidentified
MVFVLDRHHKPLMPCHPARARRLLGKGRARIHKLYPFTIRLVDRELKDSTVQPVVLKLDPGSKETGMALVREDETKTHHALYFVNLKHRGSEIKPSLLQRSSFRRSRRSRNLHYRAPRFLNRTRPQGWLAPSLQHRVDTTLSWVERLRKLAPVATLEMELVKFDTQKMQNPEIDGVAYQQGELAGFEVREYLLEKFGRKCIYCGAEGVPLNIDHIVPKSAGGSNRVSNLVLACVDCNQKKNNLPFEVFLKGDKAKINRIRSQLKTPLKDAASVNTTRWQLFEALKLTGLSLTTATGARTKYNRHQFGVPKEHWLDALCVGKVAAIRGWHPLDVLVVKCTGRGAYKRTRLTKDGFPRGYLTRTKRFFGFGTGDMVVATVFAGKKKGSYKGRVAVRKSGSFAIQTASRKVDGISYRYCRLLSRADGYGYSWHSSKSLINSTKETALLPRINTQVSAP

SEQ ID NO: 22998 - protein, 426 aa, unidentified; identical to SEQ ID NO: 9697

SEQ ID NO: 22999 - protein, 453 aa, unidentified; identical to SEQ ID NO: 10368

SEQ ID NO: 23000 - protein, 431 aa, unidentified; identical to SEQ ID NO: 4463

SEQ ID NO: 23001 - protein, 470 aa, unidentified; identical to SEQ ID NO: 2949

SEQ ID NO: 23002 - protein, 428 aa, Moorena sp.
MQNYVFVIDTDKQPLNPIHPKKARRLLEKGKAAVFRMYPFTIILKTAIRQSRRCANANPTISPCQIKIDPGSKVTGFALVQNNQVIWGMELEHRGGLIKKKLESRRAVRRGRRNRHTRYRKPRFLNRKRPEGWLPPSLEHRILTIQTWVKRLIKFCPANEIWVERVKFDMQKMKNPEINGTEYQQGELAGYEVREYLLEKWGRECTYCGKQNVPLQIEHIHPKSKGGSDRVSNLCLACEKCNQRKGNKPVEDFLKKKPNLLQKIKTKAKQPLKDAAVVNATRNKLVKVLREVKSVTTGTGAQTKYNRTKLGLPKQHWIDAACVGGIETLVLKTSQPLLVTCFGQGGRQKAALNKYGYPIRHNPLKPIKGWCSGDIAKNILTGEFGRVNPRSKSNSFNYTVSGKKAISLHVKNLCRVHRKDGYTYGFCQ

SEQ ID NO: 23003 - protein, 462 aa, unidentified
MSVLVIGRNGRALMPTNPRKARLLLKKKTASVVCRHPFTIQLLYKTGCATQEGCIGIDTGSQHIGVGITCGDRVILKDEHALRSSMEKRSLLATRAVMRRGRRYRKVRYRKPKWRHYTKRMYFEKANRRGQHWRKVKTTTQSPRLKGWLPPSLQSKCDHHFRIIDRYLKYLPDPITRNLVIEAGRFDMARMNDPTIHGEMYQRGPMYDAENLRAYIFARDNYQCACCKAKAGTTRKADGTTVKLVAHHILFRSRGATDNPKYIISVCDHCHTTKAHQPGGILYSWMENNKKVARGLRDATFMNILRKRLFARYPQAAFTYGNITAADRKQLRLPKSHANDAVAISLFGKEASTVKNICQTMHYKQIRKSKRSLHEAIPRKGRKNPNTKAVRNKKNTTQVNGFKLWDSVLADGKKLFICSFTGTSAYLIDKNGCYISQPGKTYKQWPLSKLKRLHPNGNWLMA

SEQ ID NO: 23004 - protein, 470 aa, unidentified; identical to SEQ ID NO: 2825

SEQ ID NO: 23005 - protein, 478 aa, Acidiferrobacter sp.; identical to SEQ ID NO: 4550

SEQ ID NO: 23006 - protein, 473 aa, unidentified; identical to SEQ ID NO: 3562
  source 1..473: note = uncultured beta proteobacterium

SEQ ID NO: 23007 - protein, 448 aa, unidentified
MSTGLRAVQAEPAGIRKGDALKVFVLNMRGRPLMPCSPARARHLLKAGKAVVRRRTPFTIQLRIATGETKQSVTLGVDAGAKHVGLSAATEKEEVFASEVELRQDITGLLAARLSLRRDRRHRKTRYRAPRFLNRVRSKHKGWLAPSVENRIQAHMSRIDAVCRLLPVTKIVIETASFDVQKIRNLEVEGTGYQQGDQLGFWNVREYVLFRDGHVCQHCHGYSKDKILNVHHLESRQTGGDAPNNLITLCETCHKACHAGKIKLKVKRAQSFRAEAFMGIMRWTLLDRMRKAHSGLPVENTYGYLTKNTRITLGLPKTHCVDAYCIAGNLKAVRRGVCLHQRQVRKHNRQIHKCTVLSKTLKDGTKIGYRKLNQTPHLVKSFRLFDKVRCLGQTGFIFGRRSSGYFDVRRLDGVKLSSGISYRKLTLLEKRSTYLTELRKEDGASSPV

SEQ ID NO: 23008 - protein, 513 aa, unidentified; identical to SEQ ID NO: 3179

SEQ ID NO: 23009 - protein, 462 aa, unidentified; identical to SEQ ID NO: 9356

SEQ ID NO: 23010 - protein, 512 aa, unidentified; identical to SEQ ID NO: 20070

SEQ ID NO: 23011 - protein, 302 aa, unidentified
PSVENRINAHLSRIEAVLRLLPITKITVETASFDMQRLKNPDISGKEYQEGEQLGFWNVREYVLFRDGHVCRHCHGRSKDPVLNVHHLESRRTGSDSPDNLITLCETCHKALHRGEITLKAKRGQSFRAQAFMGIMRREVLNRLKASYPELKVHETYGYLTKHARIANGIVKSHGADAFCIAGNLGAERLGEFFFQKQTRRNNRQIHKLSILKGGIRKRNQAPFEAKGFRLFDKVACQGEEGFIFGRRSSGSFDVRKLDGTRISAGISCKKLRLLEKRRTYLTEIRKEEALPPLPEGRGLRA

SEQ ID NO: 23012 - protein, 423 aa, unidentified
KIVKHHPFTIQLLYDSKTNTQPIEICEDVGYNYIGISVKSESREYVSAQYDTLQDEKEHHDDCRKYRRTRRNRLRYRKPRFDNRKCSEGWLAPSLEHKKQLNIRLIERYVSVIPITHATVEVGSFDTMLLQAIQKGKSKPEGVDYQKGPRYNLATLREAVFYRDNYTCQVCGRKIADGAILHMHHMFYWKGRHGYQLDELVTACEKCHTPANHQKGGKLFGFGEDKEFANLSGAAFMNAVRWQIVDALYATYGKEFVTITYGAMTKEKRIALQLEKTHSNDAYAMGNCHPAHRCEFGHYQKRCRNNRVLEKFYDATYIDTRTGNKAKGKELFNGRISRNHKKDSEDLHKYRSKKMSKGCRSIRRQRYAIQPYDTVRLEGKTYITSGCHNKGTRLLIPANGKSKSVAISKVQVVCHAGAWIQII

SEQ ID NO: 23013 - protein, 423 aa, Moorena sp.
MRVFVLNKNRQPLDPCKPARARIILSKGKAKVYRRYPFTIILTEEIEEPITHGSQLKIDPGSKTSGLAIIQNNRVVWGCELTHRGFQIRDALTSRRQLRRARRHRKTRYRQPRFLNRTRPKGWLAPSLMSRVHNILTWVKKLTRLCPITGLYQELVRFDTQKLQNPEISGIEYQQGTLYGYELREYLLEKWNRKCAYCGAKGTHLEIEHIKPLSKGGSNRVSNLAIACHSCNQAKSNQEIEQFLSGKPEILKRILSQAKRPLSDAAAVNTTRWKLYHELKLFGLPVEVGSGGLTKFNRCRQNLPKTHWLDAANVGKVDTLIVEDYKPLLVAAKGHGTRQICRINKYGFPIRYCSRVKIHKGFQTGDIVRAVVTKGKKIGTYVGRVATRKSGYFNISTKSGMVQGISHKYCQFIHRKDGYAYTD

SEQ ID NO: 23014 - protein, 411 aa, unidentified
MVYVQDIDGKPMMPTTRHGKVRRLLKDNKAVVINTCPFTIKLTYKTSDYKQEIVLGVDSGTKHVGLSATTKSKELYASEVILRSDVVDLLSTRRGLRRTRRSRLRYRKQRFNNRVKSKKDGWIAPSVRHKIDSHIRIISFVYSILPVSKLIVEVAQFDTQKIKNPEISGKEYQEGEQLGFWNVREYVLARDGHKCQHCKGKSKDPILNIHHIESRKIGGDSPSNLITLCETCHKEFHKGNIKLKVSRGKSLRDAAVMGIMKWKLYEELKSRYDNVSMTFGYITKYNRINHGIEKSHVSDAFVISRNFNSCRLGYYYKRKLVRRHNRQIHKMKILKGGIRKRNQAPFKVFGFRLFDKVMFQGEEHFIYARRLSGQFNIRDINGENKKDVSCKKLKYVSHGLVSVKTNLFLSQ

SEQ ID NO: 23015 - protein, 355 aa, unidentified
MQAQGTLAFPPRRKRRRSSRPKSRFDRTSRDFWPIVWHSDVQGAIERRATALRASTIAFDQSTRDGLRRPLKTAFRRTCRVEAVCRLLPVTKIVIETASFDIQKIRNPEVEGTGYQQGDQLGFWNVREYVLFRDGHICQHCRGRSKDPILNVHHLESRKTGGDAPNNLITLCETCHKAYHAGKIKLKVKRGQSFRAEAFMGIMRWTLLDRVRKTHPKLPVENTYGYLTKHKRIALGLPKTHCADAFCIAGNLKALRRGDFLFQQQTRKHNRQIHKCSILKGGVRKLNQAPFLVKGFRLFDKVRIGGQIGFVFGRRVRGTFNIRRLDKTVIGTDINCKKLSLLETRKTFLTELRKE

SEQ ID NO: 23016 - protein, 393 aa, unidentified
TGYIHIGISVKSEKHEYLAEQIDTLTDERSRHDACRMYRRQRRSRKRYRQPRFNNRKRNDGWIAPSLEHKKNIHIQAISHICKVMPVTDITLEMGNFDTQVLKAREEGKPLPQGADYQHGERYGIATLREAVFARDGYTCQCCGRTIKNDAILHVHHIVYRSQGGTNRMSNLITVCDKCHTPANHKKGGKLYNWKPKIASFKGAAYMTAIRWKLYNEVKTLFPDIDIHITYGAETKERRRAFDINKSHVNDAFVMGQFHPKHRSKPICYKKKRRNNRCLEKFYDAKYIDSRDGKKRSGQELFNGRISRNHKKDSENLHQYRLQKVTPGRRAIRKQHYPIQPHDIIVYNGNKIEVSGCQHKGTRVVFSKTKKSVQISKIKLFKYAGGYSKSVFN

SEQ ID NO: 23017 - protein, 415 aa, unidentified; identical to SEQ ID NO: 7357

SEQ ID NO: 23018 - protein, 470 aa, unidentified
VLRPRYQYPTRWYPSREQGSGNGCLSGEENTDLKQEVSGTLSKGDHSHPGEQDFCVPAITIQGGPAMSVFVVGLNGCRLMPTSERKARLLLKHGKASVYRKVPFTIKLNYKTGSTTQSGYLGIDTGSQHIGVSVVREDGAVLHKEEIGLRDSMSKRKLMQSRASSRRGRRHRKTRYRHPKWRPKAKRVYCEIPDRKRRHWKKKEITFTSKRPKGWLPPSLQSKTDHHIRWIKKLQDLLPEGYRLSIELGRFDPARLKDPEIHGELYQKGPQYDYENVRAYVLNRDRYTCQVCGKKGGKLHVHHILYRSYGATDDPQYMATVCSDCHNTENHHQGGILYQWMQKQKKFTRGLRDATFMNILRKRLIEAFPGATFTYGNITKADRERLRLPKSHGNDATAIAIVKTGIMTVKDKEPVIYIQQVRRKKRSLHEETPRKGRKEPNRKASRYDKNTKAVTVTKRKNKKKISITGC

SEQ ID NO: 23019 - protein, 422 aa, unidentified
LNKRGKPLMPCSPAKARLLLKEKKAIVKRRTPFTIQLTIATGETKQPVGLGVDAGYKHVGLSASTDKAELYASEVELRKDITDLLSARRALRQSRRNRKTRYRAPRFDNRIRTKRKGWLAPSVENRINAHLSRIEAVLRLLPVTKITVETASFDMLLLKNPDIAGKEYQEGEQLGFWNVREYVLFRDGHVCQHCYGRSKDPVLNVHHLESRRTGGDSPGNLITLCETCHEALHRGEIALKTKRGHSFRAEAFMGMMRWEVLNRLKASHSELEVNNTYGYRTKHARIVNGIDKSHCADAFCIAGNLGAERLCEFFFQKQTRRNNRQIHKLSILKGGIRKRNQAPFEIKGFRLFDKVACQGEEGFIFGRRSSGYFDVRKLDGTRISAGISCKKLRLLEKRRTYLTEIRKEEALPPLPEGRGLRA

SEQ ID NO: 23020 - protein, 451 aa, unidentified; identical to SEQ ID NO: 2436

SEQ ID NO: 23021 - protein, 481 aa, unidentified; identical to SEQ ID NO: 5118

SEQ ID NO: 23022 - protein, 441 aa, unidentified
MPTFRLGKVRRLLKDGKAKIVKYHPFTIQLLYDSKTNTQPIEICEDVGYNYIGISVKSESHEYVSAQYDTLQDEKEHHDDCRKYRRTRRNRLRYRKPRFDNRKRSEGWLAPSLEHKKQLNIRLVERYVSVIPITHATVEVGSFDTMLLQAIQKGESKPEGADYQKGPRYNLATLREAVFYRDNYTCQVCGRKVADGAILHMHHMFYWKGRHGNSLDELLTVCEKCHTPANHQKSGKLYGFGEDVKFANLSGAAFMNTVRWQIVNELYAAFGKPFVTFTYGAMTKEKRIALHLEKSHNNDAYAMGDYHPAHRCEFGHYQKRCRNNRVLEKFYDATYIDTRTGNKAKGKELFNGRISRNHKKDSEDLHKYRSKKVSKGRRSIRRQRYAIQPYDTVRLESKTYITSGCHNKGTRLLIPANGKSKSVAISKVQVVCHAGAWIQII

SEQ ID NO: 23023 - protein, 512 aa, unidentified; identical to SEQ ID NO: 11552

SEQ ID NO: 23024 - protein, 431 aa, unidentified; identical to SEQ ID NO: 11953

SEQ ID NO: 23025 - protein, 457 aa, unidentified
MDAVAVISASGKPLMPTNPVRARKLIKKGKAVIYKYRPLFTIRLTERTDGDIQTIEYCCDTGYQHIGLSIKSRKHEYVNEQRDLLPNETERHNDSRKYRKARRRRKLRHRACRRDNRHDNQICKDGYAPSIRNKRDQHISLYRSYTEILPVERAVFEMGQFDTQVLKAIEKGEPLPQGKDYQHGERYGYATLREAVFARDDYTCICCGKNAFKDKKILCVHHLGFRIGDRTNRLANLATVCTKCHTPKNHQPKGKLYNLKPELKDFKGATFMTMVRWDMLDKLKVVSKDIQVDVTYGAATKEARRDLKIKKSHANDAYCMGSFHPSHRTDLKRYEKCRRNNRVLSKFYDATYIDIRDGKKKKANALGCNRTKRRESRRSEKNERIYRGEKVSKGRIVLRTKRAVIRPGDIVYVGKKKYIVASSKNLGKQLKLADGSLLTTSKVTKIIHCGGWKTVTL

SEQ ID NO: 23026 - protein, 526 aa, unidentified
LLRQGRLIVKEVAYMSTVYVLNKNGKPLMPTTRCGHVRRLLKEQKARAVASKPFTIQLLYETDDVVQPLYLGIDPGRTNIGVAVVKTDGTAVFTAHLETRNKEIPKLMKKRKDSRRARRTNGRRCRRQRRAKANGTLSKKCVKQTTAQNGSVSKRAKKIGVIKRHLPGCEKEALCIGIKNKEAKFNNRTRPEGWLTPTANQLLQTHINLVKKIQKFLPISDVVLEVNKFAFMRLDNPNIQKWQYQQGPLYQKASLEEAVSEMQEHHCLFCKNTIDHYHHVVPQHKNGSNTIDNIVGLCTKHHDLVHKETAWQEKLAKKKTGLNKKYGALSVLNQIILALTKGLSFLFPKHFFVTTGKNTYDYRTAHSVSKDHWLDAYCIACSVLPNDVCDSSINSHVPYELKQFRRHDRRALHKENMSRVYTLNGKKVATNRHKAIEQTTDSLEEFRQRQPNDVYKLKVKEHHPEYRNPKRNFPGCVFLVGKHTHVMQGTSGSHNGKADGYYDTNGNSYSSGKCKFVVKNKGIVFA

SEQ ID NO: 23027 - protein, 422 aa, unidentified; identical to SEQ ID NO: 9550

SEQ ID NO: 23028 - protein, 535 aa, unidentified
MYRLTTEAGIPLIPERLHDTKKRKEASRMSEYIYVLGVDGDPQMPTKRKRHVEQLLQTGRARVFRQIPFTIQLTYENKPVLQPITIAEDPGRSNIGMAVVSLSGELLSAAVVQTRNKEIVKLMDKRKQHRRASRNGERKARQRLAKKCHTMIKAGFLMRKLPMYGKDKRVKCLVIKNTESRFCNRKREDGWLTPSAEHLVQTHINLIHKMQKFLPITDVAIEINRFAFLSLEDPSISGVDFQKGPLKGYDDLNAAVEDLQDGHCLMCNSPIEHRHHIVPRSMQGSNTIGNIAGLCCKCHEKVHKDSAFEDSLKKKKAGLNKRYAAVSVLNQAIPFICKRLEQEFGKEHVHYCSGRDTSMVRRSLGYHKTKEEQLHEVDAWCIAVLSLQHVPEKAPEFDHVHEILQFRRQDRSRIKAQTSRAYYHEGKKIAKNRKKAEGQKDDSLQGWRKRQVERYGEEQTRKMISQLKVKKSIRRYNRLDRLMPGAVFYYQGVRYVMRGQHCEGTYLQAVGMRDKDFPAKKCKIVVHNQGLVFVS

SEQ ID NO: 23029 - protein, 448 aa, unidentified
MVAVLSKTGIRLMPTSSYRARKLLAKKKAVICGYRPFTIRLTERETGDVQPVELAVDTGYFHIGNSLKTAKHELAAVEIRTLMDEKQRYDDRRRYRRMRRSRLRYRAPRFDNRRRPEGWLAPSIQGRMEQNLAFLRRVLSVVPVTRIVMEMGQFDTQVLKAVEEGRPLPEGTDYQQGERYGIATLREAVFARDNYTCQCCKKTIHDGVILHAHHIVYRSQGGTNRMGNLITVCEKCHTPKNHKPGGKLYKWKPTVKSFKGATFMTAVRWIMYRSVKESFPDVDVRITYGAKTKLQRRALDITKSHVNDAYVMGDFHPKHRARPVILQKRRRNNRILEKFYDAKYIDTRDGSKKTGQQLFNGRTNRNHNTDTENLRLYRGKKLSKGKRAIRTTRYRIQPHDILVYQGQEMEASGCHNKGTRVMTTAKKSLPIGKVRVRRYSGGYYAVAE

SEQ ID NO: 23030 - protein, 416 aa, unidentified
MEDFMSNFVFVLDSHKQPLNPIRPGMARKLLTTGKAAVFKRYPFTIILKVEITAPQEPITLKLDPGSKTTGIALVQGKNVIFGAELTHRGQSIKASLESRRSLRRGRRSRHTRYRKARFLNRTRSKGWLAPSLQHRVETTLTWVTRLMKVAPISFIVQELVRFDLQQLENPEISGLEYQQGILCGYEIREYLLNKWDRKCAYCGVADTPLQIEHIHPKAKGGSDRISNLCLACENCNTRKGTQDIEQFLSKKPDVLKKILSQAKRPLKDATVVNSTRWALFNRLRMTGLPVSTGSGGLTKFNRTRLQLPKSHWLDAACVGKVEELKVLTFQPLLIKATGHGTRQMCGTNKFGFPIRHKSRKQIHFGFQTGDIINATVTAGKKVGSYVGRILCRASGSFDIATMKGWLFLWSLIQGD

SEQ ID NO: 23031 - protein, 251 aa, unidentified
MVYVQDIDGKPMMPTTRYGKVRQLLKDKKAVVINTCPFTIKLMYKTSDYKQEIVLGVDAGTKHVGLSATTKSKELYSSEVILRSDIVDLLSTRRELRRTRRNRLRYRKPRFDNRIKSKRTGWVAPSVRHRIDAHIRVIDNVCSILPISRIIVEVAQFDTQKIKNPNISGNEYQEGNQLGFWNVREYVLTRDGHKCQHCKGKSKDPILNVHHIESRKTGGDSPSNLITLCETCHKEYHKGKIDLRVKRGKSL

SEQ ID NO: 23032 - protein, 423 aa, Leptolyngbya sp.; identical to SEQ ID NO: 9497

SEQ ID NO: 23033 - protein, 415 aa, unidentified; identical to SEQ ID NO: 3582

SEQ ID NO: 23034 - protein, 456 aa, unidentified
MSTCVCVLNNSGERLMPTIRLGKVRHLLKDGKAKIVKHHPFTIQLLCDSKTNTQPIEICEDVGYNYIGISVKSESHEYVSAQYDTLQDEKEHHDDCRKMRRARRNRLRYRKPRFDNRKRSEGWLAPSLEHKKQLNISLIERYVSVIPITRATVEVGSFDTILLQAIQKGKSKPEGVDYQKGPRYNLATLREAVFYRDNYTCQVCGRKIADGAILHMHHMFYWKGRHGYQLDELVTACEKCHTPANHQKGGKLFGFGEDKEFANLSGAAFMNAVRWQIVDALHATYGKEFVTITYGAMTKEKRIILGIEKTHNNDAYAMGDYHPVHRCVFRHYQKRRRNNRVLEKFYDATYIDARTGNKAKGKELFNGRINRNHKKDSENFHKYRSKKVSKGRRSIRRQRYAIQPYDTVRLEGKTYITSGCHNKGTRLLIPANGKSKSVAISKVQVVCHAGAWIQII

SEQ ID NO: 23035 - protein, 413 aa, unidentified
MTSYAFVLDANGKQLAPTKEQKAWFLIRKKRAALVSKYPMVIQLKKEIQENEICKDEILCGIDDGGLHVGIALVQKCKTKNKVVFKGTIEQRNDVKHLMEVRRGYRRYHRYHKRYRQARFNNRKSSKREGRIAPSILQKRQATIRVINQLNKWINITNYWLEDVSIDIRVLTDGYKSYRWQYQKSNRLDENIRKATILRDGGKCMECGKSNCRLEVHHIKPKRRNGSNTLDNLITLCESCHQKTEGQEELYMDRYFSLLKSSDNKNLNYAQHVMIGKMWLRKQLSGLGVLYLTSGGDTANKRIDWNIEKSHANDAVCITDLQPDTYDMKEWTMKPMRRQSKAKTDHVLGIKHRDLVEYTFKNGETHRGYVTALYPEQKAINFQSPTKHCKKVNARKCKLLWKYSKIYWFENAS

SEQ ID NO: 23036 - protein, 440 aa, unidentified
MSVFVLDKKHEPLMPCHPARARKLLKAGRARVVKTYPFTIRLVDRLLENSAVQPVAVKVDPGSKQSGMAVVRDDGKAHHHALFFINLVHRGQVIQERMTARSAFRRRRRGANLRYRAPRFLNRKRHKGWLPPSLQHRVDTTMSWVKKLRKLVPVTALWVENVKFDTQKLQNPEVSGVEYQQGTLFGFEVREYLLEKFGRRCVYCGAENTPLNIDHVVPRAKGGSDRVSNLVLACTDCNQKKGAQPLEAFLKDKPQQFERIRRQLKAPLRDAAAVNATRWALFNALKQTGLLVATGTGAQTKFNRKAFGIPKEHWLDALCVGRINGADYPKSMGVLQVRCTGRGSYQRTRLNKYGFPRGHLMRQKRVHGFATGDMVKAVVPSGKKAGIHQGRVAVRMTGSFAIQKADGKVDGIHWRHCRLISRNDGYGYAWLRPAPHSSLI

SEQ ID NO: 23037 - protein, 366 aa, unidentified
MYVTSDYKQEIVLGVDAGTKHVGLSATTKSKELYSSEVILRNDIVDLLSTRRELRRTRRNRLRYRKPRFNNRIKSKRPGWIAPSVRYKIDAHIRVIDNVCSILPISRIVIEVAQFDTQKINNPEISGKEYQEGDQLEFWNAREYVLARDGHKCQYCKGKSKDKILNVHHIESRKTGGDSPSNLITLCETCHKEYHKGNIDLKIRRGKSLRDAAVMGIMKWRLYEELKSKYDNISMTFGYVTKYNRINHDIEKSHVSDAFVISKNFNAIRLGYYYKVRLVRRHNRQIHKQKIQKGGIKRLNQSPFEVFGFRLFDRVMFENSYYFIFGRRKTGSFNIRDIDGKSQKNITYKKFKLSRCKRFMIQKEMN

SEQ ID NO: 23038 - protein, 480 aa, unidentified; identical to SEQ ID NO: 7001

SEQ ID NO: 23039 - protein, 522 aa, unidentified; identical to SEQ ID NO: 11042

SEQ ID NO: 23040 - protein, 628 aa, unidentified
MKPWITTRILQASVREDARKCRKETIMVAVLSNTDVALMPTSSCRARILLRSKRAEIVGYHPFTIRLLDRETGNTQPIEYKSDTGSVYVGVSICSEKHEYISEERILLDDEKKKHDNCRTLRRTRRNRLRYRKPRFDNREKAKGWIAPTLQNKLDRQLDIFHAYKKVMPITSATFEVGKFDIQLLAAMESGKPVPEGKDYQQGARYQQETLRQAVFFRDSFTCQVCQKGVKDGVILRMHHIGFRKNDHSDRMANLLTVCTTCHSSKNHNPGGELWDLKPEIKPLHDAAFMNTIRWKLIDTLKETHPDVELHFTYGARTKCTRRTMHIGKSHANDAYCIGEFHPKHRCDTVYYQKQRRNNRVLEKFYDAVYLDLRTGEDEKAAALGSGRTKRNTHLAYKDQRPYRGRKVSSGHRSITRKRSPYKKGDILRVQKEYTVKEPDQNGKLQKVTKVMDVTAKLASSHSKVDSKTLKAFRTGKIKKIPKSAVMMAYDFTEPLPNGRQSCDGKHVKAVKTTKIQAWKRISKPEPKKRRLTPNDKEQTRRIPRTTYKGGGTLRHDNGKTVFRIPYIQIKNKGFKIASQISRSSVPDRPHPYRIFLPVAICKRRLYAWAARYAGTRFLKCHDRWLYA

SEQ ID NO: 23041 - protein, 425 aa, unidentified; identical to SEQ ID NO: 2429

SEQ ID NO: 23042 - protein, 475 aa, Ferroplasma sp.; identical to SEQ ID NO: 14031

SEQ ID NO: 23043 - protein, 268 aa, unidentified
LLKAIEEGKPVPQGEDYQQGEMYGHYNVRQYVLWRDDYTCQCCGAHATKKKEVRLHVHHLESRKTGGDAPRNLITLCDSCHKKHHDGLITEDDFKKRKRRSTRDATFMGIMRKTLIQRLRAELTIPVAETRGYITKATREKLLVLPKSHTNDALAIAQGKHGFNVGYLPGILQIDKIYTIRPVRHHNRQLHKATILKGGIRKSNQAEKYVFGYRLFDKVQFNGQDCFIWGRRTSGYFVVKTIDGKVIHNSASFKKLRLVERASNYLIA

SEQ ID NO: 23044 - protein, 456 aa, Halomonas sp.; identical to SEQ ID NO: 2773

SEQ ID NO: 23045 - protein, 426 aa, unidentified
LAKDHYRSIDREETNLRVYVLNKRGEPLMPCSAAKARILLKEKKAKVKRRTPFTIQLTIATGETKQPVTLGVDSGYRHVGLSASTEKAELYASEIELRQDIPELLAARRALRGARRSRKTRYRAPRFDNRKRDKGWLAPSVENRIGAHVSRVEAVLRILPVTKIIVETASFDVQRIKNPDVQGVEYQEGEQLGFWNVREYVLFRDGHECQHCHGKSKDRVLNVHHIESRRTGGDAPNNLITLCETCHKAFHRGEFELKVKRGRSFQAEAFMGVMRWTFFERLRARHPEIEVRNTYGYLTKDTRIANKIEKSHCADAFCIAGNLKAKRLGYYFFQKQTRRPNRQIHKLTILKGGVRKRHQTPYEIKGFRLYDKVLYRGKTAFIFGRRSSGYFDIRTLDGERISAAVNSKKLRLLEKRRTFLIELRRN

SEQ ID NO: 23046 - protein, 515 aa, unidentified; identical to SEQ ID NO: 5111

SEQ ID NO: 23047 - protein, 470 aa, unidentified
MSVFVVGLNGCRLMPTSERKARLLLKEGKASVYRKVPFTIKLNYKTGSTVQPGYLGIDTGSQHIGITAVREDGTVLHKEEIGLRDSMTKRKLLESKASLRRGRRYRKTRYRHPKWRPETKRVYCEKPDRKGRHWKKQKNTFTSKRQAGWLPPSLQSKTDHHIRWIRKILGLLPEGYRLSIELGRFDPARMKDPEIHGELYQKGPQYDYENVRAYVLDRDRYTCQACKKKGGKLQVHHILYKSSGATDNPQYMATVCSNCHTLENHQPGGILYRWKQEQKKFTRGLRDATFMNILRKRLMEAFPDAVFTYGNITKVDREALKLPKSHANDATAIALVRTGITSIKDNEPVIHIQQVRRKKRSLHEENPRKGRKEPNRTASRNSKNTKSVTVNKKLGKIKTQVTAWLFDRVELDGKKGWISGFTGKSCYVKDRQDKYVCLSKKYDSVSITKLKILHHCGNWVVGAETTLGKC

SEQ ID NO: 23048 - protein, 451 aa, unidentified; identical to SEQ ID NO: 3061

SEQ ID NO: 23049 - protein, 451 aa, unidentified; identical to SEQ ID NO: 19449

SEQ ID NO: 23050 - protein, 431 aa, unidentified
MPNKVYVINKHGRPLMPCSPAKARHLLDAGKAKVKKRTPFTIQLVYGSSGYTQEVILGVDAGSKTIGMSASTTKEELLSAEVKPRNDVVDLLSARREFRRARRNRKTRYRKPRFDNRVRSKHKEWLAPSVEVKIQEHITSIKRVCRILPVSKVVIETAEFDLQLLKAIADGKSVPQGEDYQKGEMYGHYNVRQYVLWRDNYTCQCCGAHATKKKEVRLHVHHLESRKVGGDAPSNLITLCDSCHEKFHKGIITAANLKKRKRRSMRDATFMGIMRKTLIQRLRAELTIPVAETRGYITKTTREKLLVLPKSHTNDALAIALGKHGFNVGYLPEIAQIDKIYTIRPVRHHNRQLHKATILKGGIRKSNQTGKYVFGYRLFDKVQFNGQDCFIWGRRTTGIFTIKTINGKMIKDGISFKKLKLVEKSTSYLIA

SEQ ID NO: 23051 - protein, 413 aa, unidentified; identical to SEQ ID NO: 5965

SEQ ID NO: 23052 - protein, 406 aa, unidentified; identical to SEQ ID NO: 7944

SEQ ID NO: 23053 - protein, 443 aa, Anoxybacillus sp.
MVEENMTCFMQRKGENPMVFVLDTNKRPLAPCHEAVARKLLKQGKAAIYKRFPFTIILKKSVDESENETTYRLKIDYGSRHTGLAILRGQEVVWLGQLDHRTDIKERIDKRRAFRRARRNRKTRYRKPRFLNRKRKEGWLPSSLESRVQNIQTWVSRLKKLCPIGYISYENAKFDTQLMRNPEISGIEYQQGTLQGYEVREYLLEKFGRKCCYCGKENVPLEVEHIIPKSRGGTDRVDNLCLACHDCNQRKGSKTAEEFGYPHIQKQVKESLKDASAINSTRWKAYEVLKQTGLDVECGTGARTKMNRIRLDLPKTHYFDACCVGESTPNHLYFKTKEVLFIKAKGRGSRSRTNLDRYGFPRGYLARQKFFFGFQTGDMVKAVVPRGKYQGVWFGEVACRKTGSFDIKGKDGKRIAQGINYRYVQVIQRFDGYAYGKGVAELA

SEQ ID NO: 23054 - protein, 419 aa, unidentified
MVYVLDINGQPLMPTARHGKVRRLLNSHLAKVVKRCPFTIQLLYQSTKETQPVSLGVDSGSKHIGLAATTEQKVVYQEELIPRNDVVKLLSARRALRRSRRNRKTRYRKARFNNRVRSKHKGWLAPSVEVKIQEHITAIKNVCKILPVSEIHVETAEFDFQRLKAMEEGKPLPVGTDYQLGEQYDFYNTRQYVLHRDGYTCQCCGTHDNNIKLHVHHIESRQTGGNAPNNLIVLCEHCHKALHEGKIELPENKKRGKSYRDAAFMGIMRSTLLERLKKEVNVPVMMTYGYITKYWREKVGLKKNHINDAICISKRPYAKLLDTYYLTKAVRHHNRQIHKANFSKGGIRKRNQAPYLVKGFRLFDKVLYQDKECFIFGRRVSGGMDVRLLDGVRINAFVGYKKLKLLESRKAYLIERRTC

SEQ ID NO: 23055 - protein, 370 aa, Lactobacillus sp.; identical to SEQ ID NO: 16713

SEQ ID NO: 23056 - protein, 442 aa, unidentified; identical to SEQ ID NO: 2903

SEQ ID NO: 23057 - protein, 423 aa, Scytonema sp.; identical to SEQ ID NO: 6470

SEQ ID NO: 23058 - protein, 441 aa, unidentified
MSVSVFVLDRKHRPLMPCRPARARRLLKSGRARVVRLFPFTIRLTDRLIEDSKLQPVLVKLDPGSRQTGVALVRADEKAHHHALFFVNLVHRGESIRDALTARRNCRRRRRGNLRHRAPRFLNRTKPQGWLPPSLRHRVDTATAWVAKLVKLAPVTGIVEELVKFDAQKLQNPEISGTEYQQGTLFEYEVREYLLEKFGRRCVYCGAENVPLNIDHVVPKARGGSNRISNLVLSCVNCNQKKDSQPVEVFLKNRPEVLDRIKRRLKTSLAHAATVNATRWSLFSALKAFGLPVETGSGALTKFNRHTFGVPKEHWHDALCAGRVNGVHYPKTMGILQVRCTGRGSYQRTRVDKYGFPRGYLTRQKRIHGFATGDMVKAVVPSGKKAGTYRGRVAVRKSGYFNIQTPEGVIQSIAWRHCRLLSFNDGYGYAWLRPAAHSSPV

SEQ ID NO: 23059 - protein, 418 aa, unidentified; identical to SEQ ID NO: 13453

SEQ ID NO: 23060 - protein, 366 aa, unidentified; identical to SEQ ID NO: 10799

SEQ ID NO: 23061 - protein, 512 aa, unidentified; identical to SEQ ID NO: 15043

SEQ ID NO: 23062 - protein, 314 aa, unidentified
VHRRTKRKGWLAPTVENRINAHLSRIEAVLRLLPVTKITVETASFDLQLLKNPDISGKEYQEGEQLGFWNVREYVLFRDGHVCQHCHGRSKDPVLNVHHLESRRTGGDSPGNLITLCETCHKALHRGEITLKAKRGQSFRAEAFMGIMRWEVLNRLKASHPELEVNNTYGYRTKHARIANDIAKSHCADAFCIAGNLGAERLGEFFFQKQTRRNNRQIHKLSILKGGIRKRNQAPFEVNGFRLFDKVACKGEEGFIFGRRSSGFFDVRKLDGTRISAGISYKKLHLLEKRRTYLTEIRKEEALPPPPEAAQRPR

SEQ ID NO: 23063 - protein, 322 aa, Parasutterella sp.; identical to SEQ ID NO: 7135

SEQ ID NO: 23064 - protein, 515 aa, unidentified; identical to SEQ ID NO: 11058

SEQ ID NO: 23065 - protein, 465 aa, unidentified; identical to SEQ ID NO: 3856

SEQ ID NO: 23066 - protein, 418 aa, unidentified
MIYVRNKEGKALMPTERGGRIGYLLRHGKGHVVSRVPFVVQLDYESTTYTQEVSLGIDAGSKHIGVSASSEKKELLAAQVELRSDVVNLLSTRRELRQTRRNRKTRYREQRFDNRKKKDGWLTPSVEQKVESHLKVIRLVHKLLPITKTTIEVAQFDAQKIKNPDIKGEEYQQGEQMGFWNVREYVLARDGHKCIHCKGKSKDPILNVHHLESRKTGGNSPSNLVTLCETCHKAYHRGEFELKIKRGTTLRDAAVMNIMRWAVYEQAKEEFRNVHMTYGYVTKHTRIENGITKTHVADAFCIAKNVNAMRLSSFFMCRCVPRHTRALHVANPKKGGIRRSCIASHKIGKSRFQRFDMVRWKGKECFIFGSTKGRPVLRDIKGIKMHENNSVNIKTISFLKRLRKNIIVEERTFESRII

SEQ ID NO: 23067 - protein, 453 aa, unidentified; identical to SEQ ID NO: 6331
  REGION 1..453: note = IscB polypeptide

SEQ ID NO: 23068 - protein, 455 aa, unidentified
MVFVLDRHHKPLMPCHPARARRLLGKGRARIHKLYPFTIRLVDRELKDSTVQPVVLKLDPGSKETGMALVREDETKTHHALYFVNLKHRGSEIKQSLLQRSSFRRSRRSRNLHYRAPRFLNRTRPQGWLAPSLQHRVDTTLSWVERLGKLAPVATLEMELVKIDTQKMQNPEIDGVAYQQGEVAGFEVREYLLEKFGRKCIYCGAEGVPLNIDHIVPKSAGGSNRVSNLVLACVDCNQKKNNLPFEVFLKGDKAKINRIRSQLKTPLKDAASVNTTRWQLFEALKLTGLSLTTATGARTKYNRHQFGVPKEHWLDALCVGETAAVRGWHPLGVLVVKCTGRGAYKRTRLTKDGFPRGYLTRTKRFFGFGTGDMVVATVFAGKKKGSYKGRVAVRKSGSFAIQTASRKVDGISYRYCRLLSRADGYGYSWHSSKSLINSTKETALLPRINTQVSAP

SEQ ID NO: 23069 - protein, 431 aa, unidentified; identical to SEQ ID NO: 5579

SEQ ID NO: 23070 - protein, 431 aa, unidentified
MVYVLDINGQPLMPTARHGKVRRLLNSHLAKVVKRCPFTIQLLYQSTKETQPVSLGVDAGSKHIGLAATTEKKVVYQEELIPRNDVVKLLSARRALRRSRRSRKTRYRKVRFNNRVHSKHKGWLAPSVEVKIQEHIAAIKNVCKILPVSEIHIETAEFDLQRLKAMEEGKTLPVGTDYQLGEQYDFYNTRQYVLYRDGYICQCCGTHDKNVKLHVHHIESRQTGGNAPNNLITLCEHCHKALHEGKIELPKGRKRGKSYRDATFMGTMRSTLLERLKKEMDIPVTMTYGYITKYWREKAGLKKSHINDAICISKHPYAKLLDTYYLTKAVRHHNRQIHKVNFSKGGIRKRNQAPYLVKGFRLFDRVLYQGENYFIFGRRATGFFDIRTLDGTKVNKGSISYKKLRIQDTAKAYLKEVQAIPHMNEFMCVLA

SEQ ID NO: 23071 - protein, 448 aa, unidentified
ILKTCFAASNLAKIVVLMDAWDIIVVLNKRGKPLMPCSPAKARHLLKEKKAAVVRRTPFTIQLTIATGESKQPVSLGVDAGYKHVGLSASTEKAELYASEVELRQDITDLLSARRALRQSRRNRKTRYRAPRFDNRIRTKRKGWLAPSVENRINAHLSRIETVIRLLPVTKISVETTSFDMQLLKNSDIAGKEYQEGEQLGFWNVREYVLFRDGHVCQHCHGRSKDPVLNVHHLESRRTGGDSPGNLITLCETCHKALHRGEITLKAKRGQSFRAETFMGIMRWEVLDRLKASHPKLEVQNTYGYRTKHARISNGIAKSHCADAFCIAGNLGAERLGEFLFQKQTRRNNRQIHKLSIPKGGIRKRNQVPFEVKGFRLFDKVAYKGEEGFIFGRRSSGYFDVRKLDGTHISAGISYKKLRLLEKRQTYLTEIRKEEALPPLPEGRGLRA

SEQ ID NO: 23072 - protein, 404 aa, unidentified
LLKEKKAIVVRRTPFTIQLTIATGESKQPVSLGVDAGYKHVGLSASTEKAELYASEVELRPDVSDLLSARRTLRQSRRNRKTRYRAPRFDNRIRTKRKGWLAPSVENRINAHLSRIGAILRLLPVTKITVETASFDTQLLKNPDISGKEYQEGEQLGFWNVREYVLFRDGHACQHCHGRSKDPVLNVHHLESRRTGGDSPGNLLTLCETCHKALHRREIKLKTKRGQSFRAEAFMGIMRWEVLNRLKASHPELEVHNTYGYRTKHTRIVNGIDKSHCADAFCIAGNLGAKRLGEFFFQKQTRRNNRQIHKLSILKHGLRKRNQAPFEVKGFRLFDKVVCQGEEGFIFGRRSSGSFDVRKLDGTRISAGISYKKLRLLEKRRTYLKEIRKEEALPPLPEGRSLRA

SEQ ID NO: 23073 - protein, 217 aa, unidentified
SWQEKLAKKKTGLNKRYGALSVLNQIIPALTKELSSLFPKHFFATNGKSTYDYRAAHGVSKDHWLDAYCIAGSVLPNDACDNNINNRVPYELKQFRRHDRRALHKENMSRVYTLNGKKVATNRHKAVEQATDSLEEFCQNHPDDVCKLKVKEHHPEYRNPKRNFPGCVFLVGKHTHVMQGTSGSHNGKADGYYDTNGNSYSSGKCKFVVKNEGIVFT

SEQ ID NO: 23074 - protein, 470 aa, unidentified; identical to SEQ ID NO: 2949

SEQ ID NO: 23075 - protein, 424 aa, unidentified; identical to SEQ ID NO: 6292

SEQ ID NO: 23076 - protein, 414 aa, unidentified; identical to SEQ ID NO: 15185

SEQ ID NO: 23077 - protein, 390 aa, unidentified
  REGION 1..390: note = IscB polypeptide
MLIFVIDLEGTPLIPTCEARARLLLKQGKAKVYSVMPFTIQLNRIVDNVVGEFKVGIDDGAKRVGISVAHDDKVVFAGTIKLRQDVSKKMLQRSQYRRTRRSRNLRHRQARFLNRGKKGWISPTIKQKKDSILRVIDYLKKQLNIVECVIEQGQFDISSMSQGYKLTGKEYQISEYKGNNWRQKVLWRDGYKCQHCGSEENLQAHHIIFKSNGGGNSVKNGITLCVECHVSLHRGEWKLMKKIKHFKYPAHLQQGKWYLYNALKKRFKIIRIYYGWMTAKARSKLGIEKTHHGDSSAMIGANKYICNPYMIIPRRTKVWDDNPTKTYTEKNGFRHWDIIKAKHTKRGSVIGSVRSLKAKCITIRTMFDNNFPVSYNKSKLLWRPSGLVYC

SEQ ID NO: 23078 - protein, 424 aa, unidentified
MFVYVLDKNGQPLMPTSRFGKVRRLLRDKKAKVVRSCPFTIRLLYEPETKIVQDVVLGVDTGSKYVGVACVGNSKVLYQAQVELRDDIKKKMDSRRMYRRNRRFRKTRYRKVRFLNRGNSIRKDRYCPTLVSKYFGHEREIEFCKEILPITKVVLEVGKFDTQLMEKPWLQQYKWAYQKGVNYGYVNAREHALARDNYTCQCCGKKNCRLEVHHIVFQSNDGSDDLENLVTLCKDCHDTIHHDGKELKLKGKRRSNLRYATQMSIIRSMLLKKYSNAEETHGYVTKANREHLGLPKYHYIDACVIASCGDKFEQSDILYQKRCVSKQDRQLCKGIRGERKIPTGKIFGFKKFDKVEYLGKVCFIKGRRSRGYFILMDINNNALDFRDKGGKREPTYQHLKRIAVRRGNLCISSRLGRNSTDGCL

SEQ ID NO: 23079 - protein, 310 aa, Erysipelotrichaceae sp.
MPITSATFEMGKFDTQLLQAIADGKPLPEGKDYQHGSKYLYQTEREAVFGRDHYTCQVCGKSVKDGVILHTHHIGFWKGYRSNRISNLLTVCEHCHTAKNHKPGGALWGLEPKSTNLAAATYMSTVRWAMYRELVPNHPKIDIHIQYGAKTAVTRKSLHLAKTHANDAYCIGSLHPKHRTAELAYQKKRRNNRILAKFYDAKYIDIRDGEKKTGSVLSCGRTNRRESRHSDKNRRIYRGKKVSKGRASVREKHYFYQPGDMVLFRSQRFVVNGVHCNGTRVILNTGKSVKMADLICIKKEGGWRFLPAQA

SEQ ID NO: 23080 - protein, 437 aa, unidentified
MVYVLSKEGKPLMPTERYGKARRMLRDGRAKVVKAKPFTIQLTYETTKYTQPITLGIDAGYQSIGFSAITEKKELLAGECQLLQGQVERNRERLMYRRQRRNRLRYRKSRFDNRRKPEGWLAPSLQNKLDTHIRLVEKIKSILPITQVIVEVANFDIQAIKNPGIQGVAYQQGEQYNFWNLREYILHRDNHECQNPGCKNRSKNQELQVHHIGYWKGDYTDRPGNLITLCDKCHRPENHREGKFLWGWQPKVKSFRAETFMSTIRWKLVRTLGCEYTYGYITKSRRIELKLEKSHVNDAFVIAGGTNQSRTIPITIQQVRRNNRSLQKFYDAKYIDLRTGEKASGQELNCGRRTRNKNLNTENLRKYRGKKLSPGRVNIRKQRYPYQPGDTVLYEGQKCTVKGVQNLGIYIKLSELSKPVKTSEVSILYYGKGLRVW

SEQ ID NO: 23081 - protein, 406 aa, unidentified
MVYVQDIDGKPMMPTTRHGKVRRLLKDNKAVVVNTCPFTIKLTYKTSDYKQEIVLGVDAGTKHVGLSATTKSKELYSGEVILRNDVVELLSTRRESRRARRNRLRYRKPRFENRVKSKRLGWVAPSVRHKVDAHIRVIDNICSTLPISRIIVEIAQFDTQKIKNPDISGNEYQEGDQLGFWNVREYVLARDGHKCQHCKGKSKDPILNVHHIESRKTGGDSPSNLITLCETCHKEYHKGNIDLKVKRGKSLRDAAVMGIMKWKLYEELKSRYPNVSMTFGYITKYNRIKYGIEKSHTSDAFVISRNFNAKRIEYQYLKRLVRRHNRQIHKMKILKGGKKKNNQAPFEVFGFRLFDKVLYNNEIFFVYGRRKSGNFNIRDFNGENPKDVSHKKFKLIRGKRHPIILK

SEQ ID NO: 23082 - protein, 414 aa, unidentified
MPCSPAKARLLLKEKKAIVKRRTPFTIQLTIATGESKQPVTLGVDAGYKHVGLSASTEKAELYASEVELRQDVSDLLSARRALRQSRRNRKTRYRAPRFNNRLRTKRKGWLAPSVENRINAHLSRIEAVLRLLPVTKITVETASFDMQLLKNPDIAGKEYQEGEQLGFWNVREYVLFRDRHVCQHCYGRSKDPVLNVHHLESRRTGGDSPDNLITLCETCHKALHRGDITLKAKRGKSFRAEAFMGIMRWEVHNRLRALHPGIEVSNTYGYRTKHARIANGIAKSHCADAFCIAGNLGAERLCEFFFQKQTRRNHRQIHKLSILKGGIRKRNQAPFEVKGFRLFDKVACQGEEGFIFGRRSSGFFDVRKLDGTRISAGISCKKLHLLEKRRTYLTEIRKEEALPPLPEGRGLRA

SEQ ID NO: 23083 - protein, 317 aa, Lamprocystis sp.; identical to SEQ ID NO: 5016

SEQ ID NO: 23084 - protein, 388 aa, unidentified
VTHKIIRGKEGKFANRHRDEGWITPSARQLVQMHMNDLKSMCKILPISHVTLERVAFDFQKLENENIKVWEYGKGKLYGYDSPEEYIHDVQNGKCLVCGKPHIDYLHHIIPRSKGGSDKVSNIAGLCYDCHYGPMGVHNCQNTQDRLPELKSEANKQYKVSLLNSVMPVLIEEMDKFCKANSIMFSICEGHDTAKVRDMYDLQKDHCIDGFAISLVDRNVKSVDVMPDRIYQKQRYKKKSKNIIQKRNCREYYDDKKLVAVNRHKGTDQKADSLEEYMNTYAETHTADECKMHFESLTVKPARRTYTFHKEGRICPLHIGDKVRYEKKNKIKGNTKVDTFICEGIRFVKDENKAEVKHNKTKSKKMKFCRVLESGCTPYVDYRKLALM

SEQ ID NO: 23085 - protein, 424 aa, Anabaena sp.; identical to SEQ ID NO: 18755

SEQ ID NO: 23086 - protein, 410 aa, unidentified
  source 1..410: note = Lachnospiraceae bacterium UBA7767
YVLSKTGQPLMPTENHAKVRILLKQGKAKVVHRCPFTIQLLYSSTNYTQKVTLGVDSGIKHIGLSATTKDKVLFESDVELRNDIVDLLSTRRELRRSRRSRKLRYRKPRFNNRRRSDRWLAPSVKQKVDSHITMIAKVHKILPISNIVVEVASFDIQKIKDPTISGTDYQQGEQLGFWNVREYVLFRDGHKCQCCKGKSKDKILNVHHIESRKTGGDAPNNLITLCETCHTGYHKGTVKLPKALHRGMSFKDATFMGIMRWALYGKLKAIYPDVKLTYGYITKNTRIKNGLPKDHYIDARCISGNPNAVSNGDVYYYKKVRCHNRRIHKNTILKCGYRKCNQAPYEVMGFRLFDKVQWKGQKCFIFGRRATGRMDLRLLDGTHINASVGYKTLKLLKMRSSYLVEQRKVG

SEQ ID NO: 23087 - protein, 413 aa, unidentified
MKVYVINKRDRPLMPTTARKARLLLKFGKATIHRREPFTIKLIYGSTGYTQPGNLGIDAGYKSVGFSAVNSTEELIGGEVKLLERISERLAERRQYRRQRRNRLRHRQPRFNNRCRLRGWLAPSIQHKLDSHHKIIKLVKEILPIKKVTVEVASFDLQKIKNPDIEGKGDQQGEQLGFSNLREYILHRDNHKCQNPNCKNKAKQPILQVHHLGFWNQDRSDRPSNLITLCSKCHTPANHKPGKFLHGWKPKLKSFKPETFMTLVWRKLTTDVGYEATYGYITKDVRREYKIEKSHHNDAFVIAGGTNQRRIEPIKYQQVRRNKRSIEQFYDAKYIDLRDGNINSGTELFSGRRTRNKNENTENLRKYRGQKVKQGQRRIKVHRYPYSQHDLVLYEGKVFSVIGMQNKGKGADC

SEQ ID NO: 23088 - protein, 444 aa, unidentified
  source 1..444: note = Candidatus Anoxychlamydiales bacterium
MLVFVLNKLKKPLMPCSPAKARRLLKKGLAKVISKKPFTIKLLFGSSRYKQEVIAGMDTGSKTIGIAAIANGKVLYQAETKLRGEEIKKKMDQRRMYRRSRRSRKLRYRKPRFLNRRANAAIDRLAPSVKHKVFSHLREKKFIESILPVSVWIVETASFDIHKITNPKGVSKALGKGRTYQKGRMLDFYNVKQYVLNRDKYQCQVCKKKNGLKLHVHHIQFRSNGGTNSPDNLTSLCETCHDKLHKLKKEEAEKSSKKLQKSAQKQTKHATEISILRSQLCKHFRNLGSSQVFEETFGYITKFNRESANLLKSHHIDAICIASRGERIEVQNQNNPSDLFLRRCVSKGDYQQTRGIRSELKIPTGKLFGLKKFDLVKTSKGVGFVKGKRSSGFFAISDINGTIISDSVNIKKNISRTQARKSILIWRSQFVSDLKDKVSLREKR

SEQ ID NO: 23089 - protein, 515 aa, unidentified
MTALEERLSKTEYIYVLGFDGKPQMPTRRKRHVLKLLKTGRARIAEDIPFTIRLTYRNAPVLQPVTLAEDPGRTNIGAAVLSPLGDLLFSAVIETRNKEIKKLMADRKKSRQASRRGERKARQRLAKRYGSMLKSGMIMRKLPMYAADKFVTCKFIRNTQARFCNRKRCPDWITPTVQHLVQTHLNIIRKISRYLPVTDIAFEVNRFAFMHMENPEAMGVDFQNGPLKGYDDVKEAIRTQQHGKCLMCKKPIAHFHHIVPRSRGGSDTIQNLAGLCTEFHTKVHTDTAFRKDFDEKKSGQLKKYGALSALNQAVPFICKKLLEEYGEEHVHFCRGLDTSLIRTALGFEKTKKNQMHEVDAYCIGLAALEVNEVKTPAFDHTFQIRQFRRQDRSIIHHQTGRSYYQGKEKVAQNRKPGFEQKTTALSQWYKEQVRIHGEKEAEKLRSQLRVEKSCRHYNDMDRFLPGAVFLYEGKRYVLSGRITNGKYLRACGQGMKNFPAAECTFIRHNAGLVFI

SEQ ID NO: 23090 - protein, 458 aa, unidentified
LKGVGMMSEIKKVDYIYVVDSNGTPLMPTSRLGMVRRWLKTGQVKWFGNSRKTIQFVRPVTTNTQELTLGVDAGFHLGLSVVGNNREYYAAESLRKSEKDRITSRRELRRTRRNRLRYRKARFDNRRRKDGWLAPSIQHRLDFTIKEIKRLYTFLPITNLVVEVTPFDNQKLLNPDIQGWQYQKGKMYGFKTIKDYLLARDNYRDALDGKQYPASQLRVHHLAQRKDGGSNQPDNLVLLSDINHNQANHNNGILAKLRENRQKTLDYRGAYFMSILATRLSNYFDNYTTTQGYLTANLRQKYEIEKSHLNDAFVIAGGTDTTLRTNNVYSRQKLRNNNRVLQKFYDAKYIDSRDGKQKAGKELSSGRTRRSQEINYDNLRQFRKEKVKKGRVSIRKGHYQLRPHDVVLNTRTNRIETVKGVQNSGTVIKFQTGKTCSIKGVISLYHVNGILEKKMESI

SEQ ID NO: 23091 - protein, 418 aa, Moorena sp.
MQNYVFVIDANKQPLNPIHPRKARRLLDKGKAAVFRMYPFTIILKTAISNPTISPCQIKIDPGSKVTGFALVQNGQVIWGMELEHSGGLIKKKLESRRAVRRGRRNRHTRYREPRFLNRKRSEGWLTPSLEHRILTIQTWVKRLIKFCPVNEIWIERVKFDTQKIQNPEISGVQYQQGELVGYEVREYLLEKWGRECAYCGKKGVPLQVEHIHPKSKGGSDRVSNLCIACEKCNQRKGNKPIEDFLKKKPNLLQKINTKAKQPLKDAAAVNATRNKLVKVLKEIKPVITGTGAQTKYNRTKLGFPKEHWIDAACVGDIETLTLKVSQPLLVTCKGQGGRQKAALNKYGYPIRHNPLKPIKGWVTGDIAKHQKLGIGKVTPRTKGSFGFTPLGLKGYKSCSPKDLVAVHRKDGYTYSFC

SEQ ID NO: 23092 - protein, 401 aa, unidentified
MSVFVVGLNGCRLMPTSERKARLLLKQGKAFVEQKVPFTIRLNYKTGSTTQLGYLGIDTGSQHIGVSVVREDGTVLHKEEIGLRDSMSKRKLLEAKASLRRGRRYRKTRYRHPKWRPKTKRVYCEVPDRKGRHWQKKKITFTSKRPKGWLPPSLQSKTDHHIRWIKKLQDLLPEGYRLSIELGRFDPARMKNPEIHGDLYQKGPQYDYENVRAYVLDRDRYTCQICKKKGGKLHVHHILYRSHGATDDPQYMVTVCSDCHSAQNHLPGGILYQWMQEQKRFSRGLRDATFMNILRKRLIRAFPEAVFTYGNVTKVDREKLKLPKSHGNDATAIALVKTGITAVKDKESVICIQQVRRKKRSLHEETPRKGRKEPNRTAARNNKNTKAVTVTKRQNKKKVSM

SEQ ID NO: 23093 - protein, 413 aa, unidentified; identical to SEQ ID NO: 7541

SEQ ID NO: 23094 - protein, 397 aa, unidentified
EDVGYNYIGISVKSESHEYVSAQYDTLQDEKEHHDDCRKYRRTRRNRLRYRKPRFDNRKCSEGWLAPSLEHKKQLNIRLIERYVSVIPITRATVEVGSFDTMLLQAIQKGESKPEGVDYQKGPRYNLATLREAVFYRDNYTCQVCGRKIADGAILHMHHMFYWKGRHGYQLDELVTACEKCHTPANHQKGGKLFGFGEDKEFANLSGAAFMNAVRWQIVNALYATYGKEFVTITYGAMTKEKRIALQLEKTHSNDAYAMGDYYPAHRCVFRHYQKRRRNNRVLEKFYDATYIDTRTGNKAKGKELFNGRISRNHKKDSEDLHKYRSKMVSKGRRSIRRQRYAIQPYDTVRLEGKTYITSGCHNKGTRLLIPANGKSKSVAISKVQVVCHAGAWIQII

SEQ ID NO: 23095 - protein, 411 aa, Desulfosporosinus sp.; identical to SEQ ID NO: 8287

SEQ ID NO: 23096 - protein, 350 aa, unidentified
GGAIRDALKARSAFRRRRRSQNFRCRSPRFLNRVKPKGWLPPSLRHRVETTLSFVRRMCRYLPVSGIATELVKFDSQKLQNPEVSGVKYQQGTLFEYEVREYLLEKFGRKCVYCGAEGVPLNIDHVVPRAKGGSNRVSNLVLACVSCNQKKGARSLEDFLKGKPEVLARVRRELKTPLRDAAAVNATRWVLFNELKATGLPVETGSGALTKLNRHAFGVEKEHWLDALCVGRLNGVVTRKGLNVLEIRCMGRGSRQRTRLTKYGFPRGYLMRQKCVHGFATGDMVEANVPKGKKAGLWRGRVAVRVSGSFNIQTPKGVIQGVGWKHCRLISHNDGYGYAWLGHAPHSSPA

SEQ ID NO: 23097 - protein, 494 aa, unidentified; identical to SEQ ID NO: 3039

SEQ ID NO: 23098 - protein, 420 aa, unidentified
MQYVYVLNKHGEPLMPCSPRKARLLLKQKKAYVIKRTPFTVKLLYGSAGYKQPVTLGVDAGSKHIGISATTEKHELYREEATPRNDVVDLLSARRAFRRSRRNRKTRYRAPRFNNRVHSKHKGWLAPSVEVKIQEHITLIKHACRILPVTLVRVETAEFDTQRLKAMLEGKPLPVGTDYQLGEMYDEYNVRQYVLKRDNYTCQCCGAHSTKTKGVKLHVHHIETRRTGGNAPNNLITLCKACHKALHAEKVTLDGKKRGKPLKDAAFMGIMRKTLMERLRKELKIPVQGTYGYITKCLREKNGIPKSHTNDARCISKNPLAIPCDTCYYTKAVRHHNRQLHKATILKGGIRKANQAPYIVKGYRLWDKVAYNGTECFITGRRTSGYFALKKLDGTVASNSISYKKLRLLEAATNYIIERK

SEQ ID NO: 23099 - protein, 443 aa, unidentified; identical to SEQ ID NO: 15325

SEQ ID NO: 23100 - protein, 511 aa, unidentified; identical to SEQ ID NO: 11885

SEQ ID NO: 23101 - protein, 458 aa, Acidithiobacillus sp.; identical to SEQ ID NO: 13713

SEQ ID NO: 23102 - protein, 445 aa, Ktedonobacter sp.
  VARIANT 445: note = X can be any naturally occurring amino acid
VSKVFVLDTQKQPLNPVHPGRARMLLSSGKAAVFKRYPFTLILKGRGEQPQVAPLRIKIDPGSKTTGIAIVNDTSGEVVFAAELSHRGQEIKKRLERRRGVRRSRRQRHTRYRKPRFENRHNKQRGWIAPSLESRVCNVVTWVQRLMRVCPIVAMSQELVKFDMQAMEQAEIKGIEYQQGTLQGYETREYLLEKWNRMCAYCSAKDIPLQIEHIHPRAKGGSDRLSNVTLACEACNSKKGTQDVRAFLATKPDVLRRILAQAQAPLEDAAAVNTTRWALYERLKALGIPLECGTGGRTKYNRVTRGIEKAHWCDAACVGASTPEHLHLSGVVPLLITADGHGSRQMCLMDKHGFPRTGPKQAKHVQGFQTGDMVRAIVTRGTKIGTYVGRVAVRATGSFNITTKQGTIQGISHRYCTALHTCDGYSYGQGEPLHPSPEKECLFPX

SEQ ID NO: 23103 - protein, 442 aa, Lactobacillus sp.; identical to SEQ ID NO: 7095

SEQ ID NO: 23104 - protein, 378 aa, unidentified
MPDKVYVISRLGHPLMPCSPAKARHLLDDKKAKVVKRMPFTIRLLYGSTKYIQPIILGVDAGSKTIGLSASTAKEEVFAAEVMPRNDVVENLSTRREFHRARRNRTTRYRKPRSDNRVRSNHERWLAPSVKVKIQEHITSIKRVCTILPISKVVIETAEFDLQLLKAIQEGKPIPEGEDYQKGEMYGSYNVCQYVLWRDNYTCICCGVRGTPKNPVRLHVHHFESRKYGGNAPDNHGTLCDDCHKKFHLGIITDVKLKTRRRQSTRDAAFMGIMRKTLMWRLRTELFIPVAETKGYITKATREKLLVLPKSHTRDALAIAQGRHGFGIKEYAYVEPANHIYTVRPVRHHNRQLHKASILKGGIRKRNQASKYVLGLRR

SEQ ID NO: 23105 - protein, 408 aa, unidentified
MTALEERLSKTEYIYVLGFDGKPQMPTRRKRHVLKLLKTGRARIAEDIPFTIRLTYRNAPVLQPVTLAEDPGRTNIGAAVLSPLGDLLFAAVIETRNKEIKKLMADRKKSRQASRRGERKARQRLAKRYGSMVKSGMIIRKLPMYAADKFVTCKFIRNTQARFCNLKRCPDWITPTVQHLVQTHLNIIRKISRYLPVTDIAFEVSRFAFMHMENPEAMGVDFQNGPLKGYGDVKEAIRTHQHGKCLMCKKPIAHFHHIVPRSRGGSDTIQNLAGLCPECHTKVHTDTAFRKDFDEKKSGQLKKYGALSALNQAVPFICKKLLEEYGEEHVHFCRGLDTSLIRTALGFEKTKKNQMHEVDAYCIGLAALEVNEVETPAFDHTFQIRQFRRQDRSIIHHQTGRSYYQGRE

SEQ ID NO: 23106 - protein, 370 aa, unidentified
VDAGYKHVGLSASTEKAELYASEVELRQDVSDLLSARRALRQSRRSRNTRYRAPRFDNRIRTKRKGWLAPTVENRINVHLSRIETVLRLLPVTKITVETASFDTQLLKNPDIAGKEYQEGEQLGFWNVREYVLFRDGHVCQHCHGRSKDPVLNVHHLESRRTGGDSPGNLITLCETCHKALHRGGITLKAKRGQSFRAEAFMGIMRWEVLNRLKASHPELEVNNTYGYWTKHARIANGIAKSHCADAFCIAGNLGAERLGEFLFQKQTRRNNRQIHKLSILKGGRRKRNQASFEVKGFRLFDKVACKGEEIFIFSRRSSGYFDVRKLDGTRISAGISYKKLRLLEKRRTYLTEIRKEAFSPLPEGRSLRA

SEQ ID NO: 23107 - protein, 456 aa, unidentified
MSTCVCVLSNNGERLMPTIRLGKVRHLLKDGKAKIIKHHPFTIQLLYDSETNIQPIEICEDVGYNYIGISVKSQSHEYVSAQYDTLQDEKSCHDACRRMRRTRRNRLRYRQKRFDNRKRDKGWLAPSLKHKKELNVNVIKMYCEVVPITHATVEVGSFDTMLVKAIEEGKATPEGADYQKGPRYNLATLREAVFYRDNYTCQVCGREASEGAILHVHHMFYWKGRHGNSLSELITVCEKCHTPANHQKGGKLYGFGENVKFADLSGAAFMNTVRWQIVNELYAAFGKDFVTVTYGAMTKEKRIALHLEKSHNNDAYAMGNCHPAHRCEFGHYQKRCRNNRVLEKFYDATYIDTRTGDKAKGKELFNGRISRNHKKDSEDLHKYRSKKVSKGRRSIRRQRYAIQPYDTVRLESKSYITSGCHNKGTRLLIPANGKSKSVAISKVQVVCHAGAWIQII

SEQ ID NO: 23108 - protein, 346 aa, unidentified
KETKFTNRTRPEGWLTPTANQLLQTHINLVKKIQKFLPISDVVLEINKFAFMRLDNPNIQKWQYQQGPLYQKASLEEAVSEMQEHHCLFCKKPIAHYHHVVPQSENGSNTIGNIVGLCTKHHDLVHKDTAWQKKLAKKKTGLNKKYGALSVLNQIIPALTKELSSLFPKHFFATNGKSTYDYRAAHGVSKDHWLDAYCIACSVLPNDVCDSNINSRVPYELKQFRRHDRRALHKANMNRVYTLDGKKVATNRHKAIKQTTDSLEEFRQRQPDDVCKLKVKEHHPEYRNPERNFPGCVFLVGKHTHVMQGTSGSHNGQADGYYDTNGNSYSSGKCKFVAKNKGIVFA

SEQ ID NO: 23109 - protein, 424 aa, unidentified; identical to SEQ ID NO: 3434

SEQ ID NO: 23110 - protein, 426 aa, Parasutterella sp.; identical to SEQ ID NO: 3045

SEQ ID NO: 23111 - protein, 366 aa, Anoxybacillus sp.
MVFVLDTNKCPLAPCHEAVARKLLKQGKAAIYKRYPFTIILKEIVDNFRPKTPYRLKIDHGSKHTGLAILRGQEVVWLGQLDHRTDIKERMDKRRAFRRARRNRKTRYRKPRFLNRRRKDGWLPPSLESRVQNIQTWVNRLKKLCPIGYISYENTKFDTQLMRNPEISGIEYQQGTLQGYEVREYLLEKFGRKCCYCGKENVPLEVEHIIPKSRGGTDRVDNLCLACHDCNQRKGSKTAEEFGYPHIQKQVKESLKDASAVNSTRWKVYEVLKQSGCEVECGTGARTKMNRIRLDLPKTHYFDACCVGESTPNHLYFKTKEVLFIKAKGRGSRSRTNLDRYGFPRGYLARQKFFFGFQTGDMVKAV

SEQ ID NO: 23112 - protein, 424 aa, unidentified; identical to SEQ ID NO: 14112

SEQ ID NO: 23113 - protein, 423 aa, unidentified; identical to SEQ ID NO: 3951

SEQ ID NO: 23114 - protein, 438 aa, unidentified
GAVFYRHYPAVIILKDVDARNIYKLPSYRIKIDPGAVHTGIAIVCNETNEVMYFLQIEHRGSEVKKALITRKQTRRNRRSRETRYRRCKFKNGGDFDSSRKNGWLPPSVKSTADNVIHWVEKLCRYINITECSFEAVRFDSQLMDNPEIGGEEYQQGTLSGYELREYLMEHFRHTCQYCGGESGDPVLEWEHKIPRSRGGSDSVKNASLACSCCNRDKGNRTLEEYLEDSKHISPKGKSEKALNEARISHISGILEKGTIYGSNRYSAWVNSTRRYIEKYLFLMFDDVECCSGGRTKYNRIKLKLPKDHHYDALCVGSVPKEGYTDRTNSYVLYVKATGRGTRFRGQCNSCGVITVKYKNNSKRKFGFQTGDIVQLNKPKGKDTGQYTGKVAVRSSGSFDLIRKGCKRITANYKYFRMMQYSDGYEYLGPLRPIPHSA

SEQ ID NO: 23115 - protein, 268 aa, unidentified
LLKAIEEGKPVPQGEDYQQGEMYGHYNVRQYVLWRDGYTCQCCGAHATKKKEVRLHVHHLESRKVGGDAPDNQVTLCESCHEKLHKGLIAEKDFKKRKRKSTRDATFMGIMRKTLMQRLCSELPIPVIETRGYITKATREKLLVLPKSHTNDALAIAQGKQGFNVGYLPGIVQINKIYTIRPVRHHNRQLHKATILKGGIRKSNQAEKYVFGYRLFDKVQFNGQDCFIWGRRTSGYFVVKTIDGKVIHNSASFKKLNLVERASNYLIA

SEQ ID NO: 23116 - protein, 420 aa, unidentified
MVYVISKNGKPIMPTENHAKVRLLLKYGKAKVVRRTPFTILLLTSSKTYRQNITLGVDAGSKHIGMSATTEKKELFSAELNPRNDVVELLSTRRELRRSRRNRKTRYRKARFNNRVHSKYKGWLAPSVEVKIWNHIQGINLINKILPLTTIRVETAEFDLQRLKATEEGNPLPVGKDYQLGEQYSHYNTRQYVLHRDGYRCACCGAKSTKKKEIKFHVHHLESRKTGGNAPSNLITLCETCHKLYHIGKLRLPVDKHRIKSMRDATFMGIMRKTLMERLRNMFSNVEVKETMGYITKYWRECNNIEKSHTSDAFVIANNFSAKRLDKSLLIKPKRQHNRQIHKCTINKGGKRKLNQTPKYVFGYKLFDKVLCLGQEGFIFGRRSSGYFDIRKLNGEKIHTGISYKKLKLLEHSNSMLIAY

SEQ ID NO: 23117 - protein, 375 aa, unidentified
VKLGVDAGSKFIGLSASTDKAELYASEVELRTDVVDLLSSRRELRRARRNRKTRYRAPRFNNRVHSKNKGWLAPSVENKINAHLSRVDAVRQLLPVTKIVVETASFDIQKIKNPDIEGADYQWGEQLGFWNVREYVLFRDGHRCCHCHGKSKAPILNVHHLESRKTGGDAPNNLITLCETCHKAYHAGKIVLKAKRGQAFRDAAFMGIMRWTFFNRLKAQCPELDVRNTYGYLTKNTRIRHGLDKSHHTDAFCIAGNLGAKRLGEYFFQKQTRKHNRQIHKMSILKGGVRKRQQAPYEVKGFRLFDKVRYGSREAFIFGRRNSGYFDIRLLKGEKVSPAISYKYLQLLESRKTFLTQLIKKDAIPPATEVAGFLA

SEQ ID NO: 23118 - protein, 427 aa, unidentified; identical to SEQ ID NO: 9446
  source 1..427: note = Chlamydiae bacterium

SEQ ID NO: 23119 - protein, 408 aa, unidentified; identical to SEQ ID NO: 21993

SEQ ID NO: 23120 - protein, 442 aa, unidentified; identical to SEQ ID NO: 12678

SEQ ID NO: 23121 - protein, 423 aa, Arthrospira sp.; identical to SEQ ID NO: 3251

SEQ ID NO: 23122 - protein, 415 aa, unidentified; identical to SEQ ID NO: 6534

SEQ ID NO: 23123 - protein, 370 aa, unidentified
  source 1..370: note = uncultured archaeon
VDSGYKNIGLSAVTSKKEVYSAEVRLRADIVKLNSERRQYRRARRNRKTWYRQPRFLNRKKPEGWLAPSIQHKLDSHFKLIERIKSILPVTRIVVEVAAFDIQKIRNPEISGTGYQNGVQKDSWNVREYVLHRDNHTCQVCHGKSKDPVLETHHIVSRQVGGDSPDNLVTLCQTCHSKVSKGKLVLDIENPVGFRPETFMSTVRWMLVNRLREMGNIVSHTYGYLTKSNRIALGVEKSHMNDAFVISGGTMQERSPISYLIKQVRRCNRKLFKGDRSHIKNTATRFVHGFQRYDKVLWNNIECFVFGRREKGYFDLRKLDGTKVHASANVKEIGLLERASTSLIEPFEWGTLLYFPKNRVPATPAPHRGV

SEQ ID NO: 23124 - protein, 420 aa, unidentified; identical to SEQ ID NO: 3288

SEQ ID NO: 23125 - protein, 524 aa, unidentified
MPTTRCGHVRKLLNSKKAVVVNSNPFTIRLKYDTPNGVQDVFAGIDSGRENIGSGASNEDGDCLYLGELKTSNKSIKLKMTERAGFRKERRRHDRQNKQRKARKDHTEIQNGNADICRTTISCKSVQISYPAAEKSVTHKIIRGKEGKFANRHRDEGWITPSARQLVQMHMNDLKSMCKILPISHVTLERVAFDFQKLENENIKVWEYGKGKLYGYDSPEEYIHDVQNGKCLVCGKPHIDYLHHIIPRSKGGSDKVSNIAGLCYDCHYGPMGVHNCQNTQDRLPELKSEANKQYKVSLLNSVMPVLIEEMDKFCKANSIMFSICEGHDTAKVRDMYDLQKDHCIDGFAISLVDRNVKSVDVMPDRIYQKQRYKKKSKNIIQKRNCREYYDDKKLVAVNRHKGTDQKADSLEEYMNTYAETHTTDECKKHFDSLVVKPARRTYTFHKEWRICPFHIGDKVRYEKKNKIKGNTKVDTFICEGIRFVKDENKAEVKHNKTKSKKMKFCRVLESGCTPYVDYRKLALM

SEQ ID NO: 23126 - protein, 396 aa, unidentified
VKRRTPFTIQLTIATGETKQPVSLGVDAGYKHVGLSASTEKAELYASEVELRQDITDLLSARRALRQSRRNRKTRYRAPRFDNRIRTKRKGWLAPSVENRINAHLSRIETVLRMLPVTKITVETASFDMQLLKDPDISGKEYQEGEQLGFWNVREYVLFRDGHVCQHCHGRLKDPVLNVHHLKSRRTGGDSPGNLITLCETCHKALHRGEITLKAKRGQSFRAETFMGIMRREVLDRLKASHPKLEVQNTYGYWTKHARISNGIVKSHCADAFCIAGNLGAKRLGEFLFQKQTRRNNRQIHKLSILKGSLRKRNQAPFEVNGFRLFDKVAYQGDEGFIFGRRSSGFFDIRRLDGTRISAGINYKKLRLLEKRRTYLTEIRKEEALPPLPEGRGLRA

SEQ ID NO: 23127 - protein, 403 aa, unidentified
LLKEKKAIVVRRTPFTIQLTIATGESKQAVNLGVDAGYKHVGLSASTEKAELYASEVELRQDVSDLLSARRALRRARRNRKTRYRAPRFDNRIRTKRKGWLAPSVENRINAHLSRIETVLRLLPVTKITVETASFDTQLLKNPDIAGKEYQEGEQLGFWNVREYVLFRDGHVCQHCHGRSKDPVLNVHHLESRRTGGDSPGNLITLCETCHKALHRGDITLKAKRGKSFRAEAFMGIMRWEVHNRLRALHPGIEVSNTYGYRTKHARIANGIAKSHCADAFCIAGNLGAERLGEFFFQKQTRRNNRQIHKLSILKGGRRKRNQASFEVKGFRLFDKVACKGEEIFIFSRRSSGYFDVRKLDGTRISAGISYKKLRLLEKRRTYLTEIRKEAFPPLPEGRSLRA

SEQ ID NO: 23128 - protein, 319 aa, unidentified; identical to SEQ ID NO: 3180

SEQ ID NO: 23129 - protein, 431 aa, unidentified; identical to SEQ ID NO: 4463

SEQ ID NO: 23130 - protein, 430 aa, unidentified; identical to SEQ ID NO: 6024
  source 1..430: note = Spirochaetales bacterium UBA5920

SEQ ID NO: 23131 - protein, 418 aa, unidentified; identical to SEQ ID NO: 14280

SEQ ID NO: 23132 - protein, 273 aa, unidentified; identical to SEQ ID NO: 9974

SEQ ID NO: 23133 - protein, 415 aa, unidentified; identical to SEQ ID NO: 2995

SEQ ID NO: 23134 - protein, 465 aa, unidentified
  source 1..465: note = Ignavibacteria bacterium
MIFTIDKNGNPGHPTKRFDLIRKLRKQRKVRIIGGGASGKPPVAIFLDREFDASRTIDRKHIIALDPGYSYIGFAVCEIMNGKLVIYCRGILQTRISDIKGLMSDRRSHRRRRRYLSRFKQKRLSFKKGKVLTKFKAPRNVRSVNRASATLKHGIETHLNLYRKLLRFFPFPECQVQFVMEDNMFNIRAMTWGNTSDTDYQKSPRTSIKEKKCVLCGSLEKLNQHHLIPRKMGGTNIPENKVYLCEDCHRDVHAGRVYLPVTGIKQWRGLGTMNAIIGVLRRLPFIYFVPVSDMVSKRNALKLEKDHGNDALATAAAFCDCTMIDTSFEKRLILVKFRRHIRAHTHAQRERHYKVNGVMIAQNRKKRTDQKEPSFADVSPLSPDQQRKLEVYPGVKLFNPLRENALCTGGDVWVYVPTGQRFIAKGVTSKTYLYSPMLESIVGKSYVRPDKCSRIVHNEGIVVWS

SEQ ID NO: 23135 - protein, 422 aa, unidentified; identical to SEQ ID NO: 5333

SEQ ID NO: 23136 - protein, 427 aa, unidentified
LTKDENRPSGRTTGLRAEQAEPAGIRKGDTLKVFVLNMRGKPLMPCSPAKARHMLKAGKAFVVRRTPFTIKLTIATGETKQDVTLGVDAGARHVGISATTEKEEVFASEVALRQDITGLLADRLAFRRARRNRKTRYRAPRFNNRVRSKHKGWLAPSVENRIQAHISRIEAVCRLLPVTKIVIETASFDIQKIRNPEVEGTGYQQGDQLGFWNVREYVLFRDGHICQYCRGRSKDPILNVHHLESRKTGGDAPNNLITLCETCHKAYHAGKIKLKVKRGHSFRAEAFMGIMRWTLLNRMRKAHPSLPVENTYGYLTKHKRIALGLPKTHCADAFCIAGNLKALRRGDFLFQQQTRKHNRQIHRCSILKGGVRKLNQAPFLVKGFRLFDKVRIGGQIGFVFGRRVRGIFNIRRFDKTVIGKDINCKKN

SEQ ID NO: 23137 - protein, 432 aa, Desulfobacter sp.
MRGEALMPTTVQKARLLLKNGKARIHSHRPFTIQLTYATGEAKQDLVLGVDAGYHNIGISVVSPTNEVFSSEIKLLQGQVERNKERRMYRTQRRSRLRYRKPRFDNRIKPKGWLAPSIQHKFDSHIKFIKRLCSVLPITKTIIEIAAFDIQKIKAPEINGKQYQEGEQLGFWNLREYILHRDNHKCQNPNCKNKSKNQILEIHHIGFWKKDRSDRPGNLITLCDKCHTPAKHKKKGFLYGWEAKTKSFKPETFMSIVRWKLVDELKCAHTYGHITKHKRIGLSLPKTHYHDAFCIAGGENQERCKPIFFHQKRKNNRCLEKFYDAKIIDTRTGKKVSGGELHSGRRTRNKNLNGENLRKYRGVKVSKGRRQIRKQRYAIRPDDIVKFDGKIYRAIGVQNKGQYLKIVNGSKPIVKNIKYIEVLFHQKTLKTV

SEQ ID NO: 23138 - protein, 417 aa, unidentified
MPCSPAKARLLLKEKKAIVKRRTPFTIQLTIATGEAKQPVALGVDSGYKHIGLSATTEKAELYASEVELRQDITDLLSARLALRRSRRSRKTRYRAPRFDNRVANKREGRLAPSVENRIAAHMSRVEAVMRVLPVAAITVETAAFDTQLLKNPDIAGAAYQQGEQLGFWNVREYVLFRDGHVCQHCRGKSKDPILNVHHIESRRTGGDAPNNLITLCETCHKAFHRGEIKLKVRRGKSFKAETFMGIMRWTLLERLKKAHPELRVRNTYGYLTKHKRISHGIAKSHCADAYCIADNLGAKRLEGFFFQKQTRKHNRQIHKLSILKGGLRKKNQAPYEVKGFRLFDKVICKGEEAFIFGRRTSGSFDVRRLDGTRISAGINYKKLRLLEPRTTYLTEFRKEAALPPLHKCRGFCAEFL

SEQ ID NO: 23139 - protein, 444 aa, unidentified; identical to SEQ ID NO: 3399
  source 1..444: note = uncultured cyanobacterium

SEQ ID NO: 23140 - protein, 489 aa, unidentified; identical to SEQ ID NO: 19542

SEQ ID NO: 23141 - protein, 627 aa, unidentified; identical to SEQ ID NO: 12202
  source 1..627: note = Lachnospiraceae bacterium UBA7276

SEQ ID NO: 23142 - protein, 362 aa, unidentified
MVYILNKHNEPMMPCSERKARLLLKQGRAVIYRKDVFTIKLINGSYGYKQHITMGIDCGSKHIGISATTNKKELFSANAELRNDIVKLLSDRKSLRRNRRYRKTRYRKPRFDNRRIKEGWLAPSIRQKIDSHVRIVSLIHKLLPVKQVNVEVAAFDIQKIKNPYIKSSEYQMGEQLDSYNVREYVLFRDNHICQHCKGKSKDDVLQVHHIESRKTGGNAPNNLVTLCKTCHEKYHSGEITLNVNRGKSFRDASVMSTMRWFLYEELKSRFSNVNITYGYITKYKRIKLGLSKEHYNDAYCITGNLNTSRLCNHHLIRFIPRHSRILHVQTFSKGGNRRSASAPYWLNGGKSSKVGITFTMFD

SEQ ID NO: 23143 - protein, 428 aa, unidentified; identical to SEQ ID NO: 4442

SEQ ID NO: 23144 - protein, 416 aa, unidentified
MPCSPAKARHLLDAGKAKVKKRTPFTIQLVYGSSGYTQEVILGVDAGSKTIGMSASTTKEELLSAEVKPRNDVVDLLSTRREFRRARRNRKTRYRKPRFDNRVRSRHKGWLAPSVEVKIQEHITAIRRVCGILPVSKVVVETAEFDLQLLKAIADGKPVPQGEDYQKGEMYGHYNVRQYVLWRDNYTCQCCGAHATKKKEVRLHVHHLESRKVGGNAPDNQVTLCESCHEKLHKGLITEKDFKKRKRRSTRDATFMGIMRKTLMQRLCSELPIPVIETRGYITKATREKLLVLPKSHTNDALAIAQGKHGFNVGYLPGIEQIDKIYTIRPVRHHNRQLHKAAILKGGIRKSNQAEKYVFGYRLFDKVQFNGQDCFIWGRRTTGIFTIKTINGKMIKDGISFKKLKLVEKSTSYLIA

SEQ ID NO: 23145 - protein, 317 aa, Lamprocystis sp.
MAVFVLDRRGKPLMPCSEKRARLLLTRGRARVHRVVPLQNPQISGVAYQQGTLAGYEVREYLLEQWGRRCAYCTGDGVPLEIDHITPRSRGGSDRVTNLTLACHPCNQAKGNRSAAEFGHPEIEAKAKQSLGDAAAVNSTRWSLFNALTATGLAVETGTGGRTKWNRTRLGVPKTHALDAACVGVVEGVTGWVAPVLSIRCTGRGAYQRTRVTQDGFPRGYLMRHKQVRGFQTGDLVRATVPSGKKAGVHMGRVAVRATGRFNIQTPQGVVQGIGYRHCCVIQRGDGYGYAQLGATALPSPAIRSRPEGRGFSRRNG

SEQ ID NO: 23146 - protein, 431 aa, unidentified
MPNKVYVINKHGRPLMPCSPAKARHLLDDGKAKVKKRTPFTIQLLFGSTGYTQEVILGVDAGSKTIGLSASAETKELFSAEVKPRNDVVDLLSTRRESRRARRNRKIRYRKPRFDNRVRSKHKGWLAPSVEVKIQEHITSIKRACRILPVSKVVIETAEFDLQLLKAIADGKPVPQGEDYQKGEMYGHYNVRQYVLWRDGYTCQCCGAHTTKKKEVRLHVHHLESRKTGGDAPSNLITLCDSCHEKFHKGIITAANLKKRMCRSMRDAAFMGIMRKTLIQRLRAELTIPVAETRGYITKATREKLLVLPKSHTNDALAIAQGKQGFNVGYLPGILQIDKIYTIRPVRHHNRQLHKAAILKGGIRKSNQAEKYVFGYRLFDKVQFNGQDCFIWGRRTTGIFTIKTINGKMIKDGISFKKLKPVEKSTSYLIA

SEQ ID NO: 23147 - protein, 462 aa, unidentified
MSVLVIGSNGRALMPTNPRKACLLLKKKTASVVCRHPFTIQLLYKTGCATQEGCIGIDTGSQHIGVGVTCGDRVILKEEHELRSSMEKRSLLVARAAMRRGRRYRKVRYRKPKWRHHTKRMYFEKPNRRGQHWRKVKTTTQSPRPKGWLPPSLQSKCDHHFRIIDRYLKYLPDSITRNLVIEVGRFDMARMNDPMIHGEMYQRGPMYDAENLRAYIFARDNYQCACCKAKAGTTRKADGTTVKLVAHHILFRSRGATDNPRYIISVCDHCHTTKAHQPGGVLYSWMENNKKVTRGLRDATFMNILRKRLFARYPQSAFTYGNITAADRKQLRLPKSHANDAVAISLLGKEASTVKNICQTMHYKQIRKSKRSLHEAIPRKGRKNPNTKAVRNKKNTTQVNGFKLWDSVLANGKKLFICSFTGTSAYLIDKNGCYISQPGKTYKQWPLSKLKRLHPNGNWLVT

SEQ ID NO: 23148 - protein, 550 aa, unidentified
LFLQIPQAFGCLLRLSIFPVDSSARVALSRTIPLTANTQPRETQPPVSAGETYSKRRVAYMPTVYVLNKDGKPLMPTTRCMHVRHLLKNGKARVVKSKPFTIQLLYETDDVVQPLYLGIDPGRTNIGVAVVKADGAVVFTAHLETRNKEVPKLMKKRKESRCARRTNGRRCRRQRRAKTNGTISKKCVKQTTAQNGSVSKRAKEIGVIKRHLPGCEKDVLCIGIKNKEAKFTNRARPEGWLTPTANQLLQTHINLVKKIQKFLPISDVVLEVNKFAFMQLDNPNIQKWQYQQGPLYQKGSLENAVSEMQEHHCLFCEKPIEHYHHVVPKSENGSNTIANIVGLCTEHHNLVHKDATWQKKLAKEKVGLVKKYSALSVLNQIIPALTKEMNSLFPKHFFVTNGKSTYDYRTAHGVSKDHWLDAYCIACSVLPNDVCDSNINSHVPYELKQFRRHDRRVLHKANMSRVYTLNGKTVATNRHKAIKQTTDSLEEFRQSHPGDVCKLKVKEHHPAYRNLNRNYPGSVFLVDGQVHVMQGVSGSHNGKADGYYNT

SEQ ID NO: 23149 - protein, 423 aa, unidentified
MVFVLDKHKQPLMPCTPKRARLLLAQGRAVVHRIKPFVIRLKDRRALDSVLQPVVLKLDPGSKTTGSALVREEATPDGPVHYALHLAELTHRGEAVHRALLQRASYRRRRRSANLRYRPCRVALRRRAPSWLPPSLRSRIGNVLTWAQRYAYWAPVSRIEVERVKFDLALMQNPEVAGVEYQRGELFGWEVRAYLLEKFQYRCAYCGRAHTVFELDHIVPRSRHGSNRVSNLALSCHDCNIAKGKQTAAEFGHPEVEAQAKRPLGDAAAVNATRYALVEALRVLGLPIGTWSGGRTRWNRDRFGIEKAHCLDALCVGTLAGVHVPPLCPLAITAQGRGRYQRTNVNGSGFPRGYFTREKRVRGFSTGDLVRAEVPAHLKTGGVRLGRVAVRASGSFRVGKTDGINARYCRVLQRMDGYSYASS

SEQ ID NO: 23150 - protein, 438 aa, unidentified
IVKHHPFTIQLLYDSKTNTQPIEICEDVGYNYIGISAKSKSHEYVSAQYDTLQDEKEHHDDCRKMRRTRRNRLRYRKPRFDNRKRGEGWLAPSLRHKKELNVNVVKMYCAVMPITYATVEVGSFDTMLVKAIQEGKVIPEGADYQKGPRYNLATLREAVFYRDNYVCKVCGRKATEGAILHMHHMFYWKGRHGNSLNELLTVCEKCHTPANHQKSGKLYGFGEDVKFADLSGAAFMNTVRWQIVNELYAAFGKPFVTITYGAMTKEKRIALQLEKSHNNDAYAMGEFHPNHRCAFEHYEKVRRNNRILEKFYDSQYIDIRTGEIATGKELFNGRINRNHKKDSENLHKYRGKRTYAGHRALLRKKVNLNPGDLVSLNGEPLVVLGTHTRKNGAVNVEFETPSKSGRKSASLKKLKIVKAADSIHPAWEKVSQIIQRKE

SEQ ID NO: 23151 - protein, 406 aa, unidentified; identical to SEQ ID NO: 2703

SEQ ID NO: 23152 - protein, 434 aa, unidentified; identical to SEQ ID NO: 2891

SEQ ID NO: 23153 - protein, 477 aa, unidentified; identical to SEQ ID NO: 8085

SEQ ID NO: 23154 - protein, 453 aa, unidentified; identical to SEQ ID NO: 6494

SEQ ID NO: 23155 - protein, 504 aa, unidentified
MAWEAIQTRRIKPHDIGEGALRRHAAGTVSFPVLCKNRKETLMSVLVIGRNGKALMPTNPRKARLLLKKKTASVVCRHPFTIQLLYKTGCATQEGCIGIDTGSQHIGVGITCGDRVILKDEHALRSSMEKRSLLATRAVMRRGRRYRKVRYRKPKWRHHTKRMYFEKANRRGQHWRKVKTTTQSPRPKGWLPPSLQSKCDHHFRIIDRYLKYLPDPITRNLVIEAGRFDMARMNDPTIHGEMYQRGPMYDAENLRAYIFARDNYQCACCKAKAGTTRKADGTTVKLVAHHILFRSRGATDNPKYIISVCDHCHTTKAHQPGGILYSWMENNKKVARGLRDAVFMNILRKRLFARYPQSAFTYGNITATDRKQLRLPKSHANDAVAISLFGKEASTVKNICQTMHYKQIRKSKRSLHEAIPRKGRKNPNTKAVRNKKNTTQVNGFKLWDSVLADGKKLFICSFTGTSAYLIDKNGCYISQPGKTYKQWPLSKLKRLHPNGNWLMA

SEQ ID NO: 23156 - protein, 326 aa, unidentified; identical to SEQ ID NO: 4303

SEQ ID NO: 23157 - protein, 481 aa, unidentified
MWTTVLRDEKPYGRSSALPVRECVSITKKRGHRMVAVLSKTGIRLMPTSSYRARKLLAKKKAVICGYRPFTIRLTERETGDVQPVELAVDTGYFHVGNSLKTAKHELAAVEIRTLMDEKQRYDDRRQYRRMRRSRLRYRAPRFDNCRRPEGWLAPSIQGRMEQNLAFLRRVLSVVPVTRIVMEMGQFDTQVLKAVEEGRPLPEGTDYQQGERYGIATLREAVFTRDNYTCQCCKKTVRDGTILHVHHIVYRSQGGTNRMGNLITVCEKCHTPKNHKPGGKLYKWNPTVKSFKGATFMTAVRWIMYRSVKESFLDVDVRITYGAKTKLQRRTLDITKSHVNDAYVMGDFHPKHRARPVILQKKRRNNRILEKFYDAKYIDARDGSKKTGQQLFNGRTNRNHNTDTENLRLYRGMKLSKGKRAIRTTRYRIQPHDILVYQGQEMEASGCHNKGTRVMTTAKKSLPIGKVRVRRYSGGYYAVAE

SEQ ID NO: 23158 - protein, 476 aa, unidentified; identical to SEQ ID NO: 15014

SEQ ID NO: 23159 - protein, 430 aa, unidentified; identical to SEQ ID NO: 3328

SEQ ID NO: 23160 - protein, 398 aa, unidentified
LKEGKAKVVRREPFIIRLLYEPETDVVQECYCGVDTGSKHIGVAVVGNDRVLYQSQTELRSDIKKKMNRKRASRRNRRNRKTRYRKPRFLNRRNSIREDKLPPSVKHKVQAHIDEIEFCKKILPVSDLILEVSQFDTALMKNPGLMNEKVKHWGYQKGFNYGYASRRGAILHRDNYTCQCCGKKNCRLEVHHIKFKSNGGTDDEENLITLCEDCHRGIHAGTVVLNKKPKKSKGLKHATHMSIIRSQLLKEYPDAIETFGFVTSENRNHLNLPKDHYIDSCVIASGGLEFKELDVIFYKRRVSKGDYRLTRGIRGEQKLPTGKLCGFRRFDKVKYFGEKYLIKGRVSRGSVLLMDIFGNKIDFSFMPRGYRTPKMSNCERVSARRSILCITKELENEE

SEQ ID NO: 23161 - protein, 455 aa, unidentified
VIKSSEGKERCPLHQTPSNIDEGCLLPERAWGQNLRVFVTNQRGKPLMPCSPAKARVLLREKKARVKRRTPFTIQLTTATGEARQDVSLGVDAGYRHVGLSASTEKAELYASEAVLRDDITDLLSARLALRRARRNRKTRYRAPRFSNRVHSKNKGSLAPSVGHKIASHLKLVENVCRLLPVTKITVETASFDMQAIKNPDIKGAEYQQGEQLGFWNVREYVLWRDGHQYRHCRGKSGDPILNVHHLESRRTRGDAPNNLVTLCETCHKAYHAGRIDLKLKRGRSMRAEAFMGIMRWTFFNRLKESHSDKTVENTYGYLTKNTRITHGIEKSHCADAYCIAGNLRAERLPEFLFQKQVRKHNRQIHKMTIGRGGIRKRQQMPFEVKGFRLFDKARLGSEEGFIFGRRSSGYFDVRRLDGQKLSAGVSFKKLHLLEKPTTYLKALLPRLKTKVSAP

SEQ ID NO: 23162 - protein, 428 aa, unidentified; identical to SEQ ID NO: 4442

SEQ ID NO: 23163 - protein, 423 aa, unidentified
MRVFVFNMRGEPLMPCTQRKARLLLKAGKAKIYKYNPFTIQLKYATGENKQECHVGIDTGSKYIGLAVTSENKVLFKGEVELRQDVKSKIDTKRIYRRSRRNRKTRYRRCRFLNRKRFGKWLPPSLQNRINHTFKWIDKLCSFIPESILHIEVGKFDIAKMINPEVHSMDYSQGQTYGYQGERYFIFARDNYTCQVCGERNKPLQTHHIIYVSNGGTNRVDNQITVCKECHTSTNHKNGGIFYKWQKEHKKVKQYKAPPFMNVLRQQILNQYPQALITYGFETTIKRKNIGLEKTHYNDAIVISGISTISENLDEWLLIKQFRKKKRSLHEGVPRKGRKEPNRIQKRNSKNTPYYRGFYLNDKVSVFGKSGYITGFTNSGAYVKGVDGEYIVLPNKSYKRVNIASLKFICHNNNWQYITKNAV

SEQ ID NO: 23164 - protein, 476 aa, unidentified
LKASGAEGVSHPGLPGKYKHKGGQLMSVAVISKTGERLMPTSEYRARKLLKSGKAIIHSYHPFTIQLTERETGDIQPIELCMDTGYIHIGISVKSEKHEYLAEQIDTLTDERARHDACRMYRRQRRGRKRYRQPQFNNRKRDKGWIAPSLEHKKDIHIQAISRINKVMPLTNITMEMGNFDTQVLKAKEEGKPLPQGADYQHGERYGITTLREAVFARDGYTCQCCGRAIKDGVILHVHHIVYRSQGGTNRMSNLITVCDKCHTPANHKKGGKLYNWKPKIASFKGAAYMTAIRWKLYNEVKTLFPDIDIHITYGAETKERRRAFDIDKSHVNDAFVMGQFHPKHRSKPICYKKKRRNNRCLEKFYDAKYIDSRDGKKRSGQELFNGRISRNHKKDSENLHQYRLQKVTPGRRAIRKQHYPIQPHDIIVYNGNKIEVSGCQHKGTRVVFSKTKKSVQISKIKLFKYAGGYSKSVFN

SEQ ID NO: 23165 - protein, 279 aa, unidentified
VVIETAEFDLQLLKAIEEGKPVPQGEDYQQGEMYGHYNVRQYVLWRDNYTCQCCGTHPSKKKEVRLHVHHLESRKVGGDAPDNQVTLCESCHEKLHKGLIAEKDFKKRKRRSTRDATFMGIMRKTLMQRLCSELPIPVIETRGYITKATREKLLVLPKSHTNDALAIAQGKQGFNVGYLPGIVQINKIYTIRPVRHHNRQLHKATILKGGIRKSNQTEKYVFGYCLFDKVQFNGQDCFIWGRRTTGIFTIKTINGKMIKDGISFKKLKLVEKSTSYLIA

SEQ ID NO: 23166 - protein, 536 aa, unidentified; identical to SEQ ID NO: 4526

SEQ ID NO: 23167 - protein, 359 aa, unidentified
LRYRKPRFDNRKRDDGWLAPSLRHKKELNVNVVKMYCAVMPITHATIEVGSFDTMLVKAIQEGKAIPEGADYQKGPRYNLATLREAVFYRDNYVCKVCGRKATEGAILHMHHMFYWKGRHGDSLDELLTVCEKCHTPANHQKSGKLYGFGENVKFADLSGAAFMNTVRWQIVNELYAAFGKGFVTITYGAMTKEKRIALQLEKTHSNDAYAMGEFHPNHRCTFEHYEKVRRNNRTIEKFYDSRYIDIRTGEIATGKELFNGRINRNHKKDSENLHRYRGKRTYAGHRALLRKKVNLNPGDLVSLNGEVLVVHGTHTNKKGAVNVEFKVPAKNGQKSASLKKLKIVKTTDSMHSAWEKIS

SEQ ID NO: 23168 - protein, 447 aa, unidentified
VVTVQRSTQHLLFDRVFIRRNLFMVYVISQDGKPLMPCSNPIARLLLKQGKAKVKKREPFTIKLTYEAPNYTQDLTLGVDTGSGTIGTAVSKDNGDIVYMSEVIVRNDITDKMTQRVKYRRNRRNRKIRYRKARWLNRANSIKNDRFSPTMQSKLHSHVKEIEYIKSILPITEMVFETGQFDTHFMKNPSLANPKVRPWGYQKGANYGFENTKAMVLNRDNYTCQCCKGKHKDSKLEVHHIVFRSQGGSDEESNLITLCHTCHKDLHSGKINPKLSGKVKGNLKYATQMNSIRKQLFRFYPNAIETFGYVTKANRLHLGVNKEHYYDACTIATQGNAFNVKSNLYKKKCVSDGDFQKTKGVCSEQPIVTDKICGFRKFDKVRYFGNDYFIKGRMSTGYAILMDIDGDKVDFSAMPKGYKTPKMVNLKRLEARSTWMITTVEVTPNIA

SEQ ID NO: 23169 - protein, 423 aa, Moorena sp.
MRVFVLNKNRQPLDPCNPARARILLSTGKAKVYRRYPFTIILTEEVKNPVIHKHQVKIDPGSKTTGLAIVQGERVIWGSELTHRGSQIRDNLISRGQLRRSRRNRKTRYRKPRFLNRTKPKGWLAPSLTSRVQNILTWVKKLIRFCPITGISQELVRFDTQKLQNPEISGIEYQQGTLYGYELREYLLEKWNRKCAYCGATGTQLEIEHIKPLSKGGSNRVSNLTIACHSCNQAKSNQDIELFLSKKPSILKRILSQSKRPLADAASVNSTRWKLYHDLKSIGLPVEVGSGGLTKFNRCRQDLPKTHWLDAANVGKVETLIIEVTKPLLITAKGHGTRQLCRTNKYGFPIRHCSRIKFHKGFQTGDIVRAVVTKGKKIGTYVGRVATRKSGSFNISTLGGLVQGISHKYCRFIHRKDGYAYTN

SEQ ID NO: 23170 - protein, 432 aa, unidentified
MNSVCVLAPDRQALDPCHPARARQLLGAGRAAVLRRFPFTIILHDRTRAASMVHAHRLKIDPGSKTSGLALVQGPRVVWAAELTHRGQRITAALRSRYAVRHSRRHRHTRYRQARFLNRTRPEGWLPPSLQSRVCNVMTWVKRLARLCPITALSQELVRFDMQQMHHAEIRGVQYQHGELAGYEVREYLLEKWGRVCAYCGATAVPLEVEHIMPKARGGSNRVSNLTLACAPCNQQKGARSAAECGLPQVQAQARRPLHDAAAVNTTRWALSQALQATGLPVETGTGGRTKYNRSRLGLAKSHWGDAACVGASTPDTLRVTGIHPVSMRAMGHGTRQMCRVDAHGFPKTHRARQKHYGGMQTGDIVKAVVPTGKYAGTWTSRVVVKASGWFDLVIDGKKASVHQRHCTRLWAADGYTYTLSAGADTAVSSPR

SEQ ID NO: 23171 - protein, 414 aa, unidentified
MPCSPAKARLLLKEKKAIVKRRTPFTIQLTIATGETKQPVSLGVDAGYKHVGLSASTEKAELYASEVELRQDITDLLSARRALRQSRRNRKTRYRAPRFDNRIRTKRKGWLAPSVENRINAHLSRIEAVLRLLPVTKITVETASFDLQLLKNPDISGKEYQEGEQLGFWNIREYVLCRDGHVCQHCYGRSKDPVLNVHHLESRRTGGDSPGNLITLCETCHKALHRGEITLKAKRGQSFRAEAFMGIMRWEVLGRLKASHPELEVNNTYGYRTKHARIANDIAKSHCADAFCIAGNLGAERLGEFFFQKQTRRNNRQIHKLSILKGGIRKRNQAPFEVNGFRLFDKVACKGEEGFIFGRRSSGFFDVRKLDGTRISAGISYKKLHLLEKRRTYLTEIRKEEALPPLPEGRGLRA

SEQ ID NO: 23172 - protein, 420 aa, unidentified; identical to SEQ ID NO: 3685

SEQ ID NO: 23173 - protein, 436 aa, unidentified
MTKTLTTRTTQACVLDQQGKPLMPTTRLGKVYRLLKTQKAHIVSYEPFTIQLDYEPNTHVIQPMTLGVDSGAIHSGYSLANEHREYYSAEVIARNDISNRLSDRRMYRQNRRSRKTRYRQPRFSNRKNKKKGWLPPSLEQKVAVQVNEINHIHRYFPIETIIVETAEFDIQKIKNPDISGIEYQQGTLQGYNIRNYLLEKHGRKCFYCGKAVSDFEVEHMLPKSKGGSNRIDNLTLSCHDCNEKKGTLTAEEFIKQTLSAKKAATKIKQLPNEKRLFKYIAHMNITRWTLYNTIKGTYPNVKMTYGYITKYNRIQAGLPKAHHIDAKCITGFATVPSMSQTVVKVKMRRHNRQLHRATFSKGHVRKAASLPTTVFGFRLYDLVCFNNHRYYIKGRRSSGYFALVSVENLKNEERSYKKLTLLAHTNAYLTNRYVNA

SEQ ID NO: 23174 - protein, 428 aa, unidentified; identical to SEQ ID NO: 3255
  REGION 1..428: note = IscB polypeptide

SEQ ID NO: 23175 - protein, 447 aa, unidentified; identical to SEQ ID NO: 3915

SEQ ID NO: 23176 - protein, 470 aa, unidentified; identical to SEQ ID NO: 10659

SEQ ID NO: 23177 - protein, 374 aa, unidentified; identical to SEQ ID NO: 10430

SEQ ID NO: 23178 - protein, 423 aa, unidentified; identical to SEQ ID NO: 4062

SEQ ID NO: 23179 - protein, 480 aa, unidentified; identical to SEQ ID NO: 2726

SEQ ID NO: 23180 - protein, 465 aa, unidentified; identical to SEQ ID NO: 17564

SEQ ID NO: 23181 - protein, 430 aa, Desulfobacter sp.
LNVFVLDTNKKPQNPVHPAKARLLLTEGKAAVFRQFPFTIILKETVLDVASNPLRIKIDPGSRDTGIAVINDDTGEIVFAMELRHRGQQIKNNLESRRAIRRSRRNRKTRYRKPRFDNRTRAEGWLPPSLKSRVHNIETWVNRLCRFCNIQAISMELVRFDMQKIQNPEISGVAYQQGELMGYEVREYLLEKWDRTCAYCGKTDIPLEIEHIVPKSKGGSNRVSNLTLACTACNRKKGNKSLEQFLSKKPRLLKRIQKQSGVPLKDAGAVNTTRWDLFRTLKKTGLPVETGSGGLTKFNRTTRGLHKTHWLDAACVGESTPEKMFQIDKTVLIVKADGHGSRQMCRVNKFGFPRTTAKSTEKKVKGFQTGDIVKAVVTSGKKVGTYIGRVAVRKSGSFNIKTVDKTVQGISWKYCRLLHASDGYSYNTTC

SEQ ID NO: 23182 - protein, 447 aa, Lachnoclostridium sp.
  source 1..447: note = isolate UBA7122
MPATASIYNIGEGKLTSYKEVRNLRVFVKNLRGQSLMPCSQRKARLLLKNKKAKIYCYNPFTIQLLYATGETVQKCNIGIDTGSRHIGLAITSEKKVLFKGEINLRQDVKSNLDTRRIYRRNRRNRKTRYRKARFLNRVKSKKQNWLPPSIESKINHTFNWIDKLENLAADTKLHIEAGKFDIAKMIRPDIQGKDYQQGQCYGYFDTRYFVFARDGYTCQCCKKKNKILNTHHIIYRSNGGTDRADNLITVCTDCHTSENHEKGGILYEWQQRHKKVKQYKEPPFMNIIRKRILKKYPDAVICYGSQTTPKRKDMNLDKTHYNDAIIISGIEDIKENPDEWLLIKQFRKKKRSLHEANARKGRKEPNITQKRNSKNTSYYKGMYLNDYVEVFGQKGYISGFTNGGVYVKNTNDGYITMPGKKYKQVSISNIVRICHNNNWQYYMQNI

SEQ ID NO: 23183 - protein, 544 aa, unidentified; identical to SEQ ID NO: 21750

SEQ ID NO: 23184 - protein, 377 aa, Anoxybacillus sp.
IKATYRLKIDYGSRHTGLAILRGQEVVWLGQLDHRTDIKERIDKRRAFRRARRNRKTRYRKPRFLNRKRKEGWLPSSLESRVQNIQTWVNRLKKLCPIGYISYENAKFDTQLMRNPEINGVEYQQGTLQGYEVREYLLEKFGRKCCYCGKENVPLEVEHIIPKSRGGTDRVDNLCLACHDCNQRKGSKTAEEFGYPHIQKQVKESLKDASAINSTRWKVYEVLKQTGLDVECGTGARTKMNRIRLDLPKTHYFDACCVGESTTNHLYFKTKEVLFIKAKGRGSRSRTNLDRYGFPRGYLARQKFFFGFQTGDMVKAVVPRGKYQGVWFGEVACRKTGSFDIKGKDGKRIAQGINYRYVQVIQRFDGYAYGKGVAELA

SEQ ID NO: 23185 - protein, 443 aa, unidentified
LTKDENRPSGRTTGLRAEQAEPAGIRKGDTLKVFVLNMRGKPLMPCSPAKARHMLKAGKAFVVRRTPFTIKLTIATGETKQDVTLGVDAGARHVGISATTEKEEVFASEVALRQDITGLLADRLAFRRARRNRKTRYRAPRFNNRVRSKHKGWLAPSVENRIQAHISRIEAVCRLLPVTKIVIETASFDIQKIRNPEVEGTGYQQGDQLGFWNVREYVLFRDGHICQHCRGRSKDPILNVHHLESRKTGGDAPNNLITLCETCHKAYHAGKIKLKVKRGQSFRAEAFMGIMRWTLLNRMRKAHPSLPVENTYGYLTKHKRIALGLPKTHCADAFCIAGNLKALRRGDFLFQQQTRKHNRQIHKCSILKGGVRKLNQAPFLVKGFRLFDKVRIGGQIGFVFGRRVRGTFNIRRLDKTVIGTDINCKKLSLLETRKTFLTELRKE

SEQ ID NO: 23186 - protein, 504 aa, unidentified
LAKRTTDSAVCETGASPAERAVDRDPARDIRKDVWCGRRKPHPALPEKKGGMLMAVAVVSRTGVPLMPTSPYRARKLLASGKAEKYGYDPFTIRLTERETGDTQPVELCMDTGYIHIGVSVKSEKHEYLALQIDTLTDEKKKHEKCREKRRNRRSRKRYRKPRFDNRKRDKGWLAPSLEHKKEIHVRAAERICRVIPVTDITMEMGNFDTQALKAREEGRPLPQGTEYQQGERYGTATLREAVFSRDNYTCLCCGRTMKDGAYFHVHHIRYRSQGGTDRMANLATVCEKCHIPANHQPGGKLYNWKPEIKSFKGATFMTAVRWQMYREIKEKIPDVSVHLTYGAATKERRRALDIEKSHVNDAFVMGRFHPGHRARPELYIKKRRNNRVLESFYDARYIDSRDGKKKPGKELFNGRISRNHKKDSENLHKYRLRKVSKGKRCIRKKHYPIQPHDILVYCGRKYETAGCHNLGTGAILLPERRSIAVSKLKIYRYSGGYYKAEFN

SEQ ID NO: 23187 - protein, 408 aa, unidentified; identical to SEQ ID NO: 21203

SEQ ID NO: 23188 - protein, 440 aa, Clostridium sp.
VPLMVYVLSKEGKPLMPTNRYAKVRVLLKSKKAVVVNSKPFTIKLSYNTEDFVQPITLGIDSGYLNIGFSAITKEKELISGEVKLLKGMSERLKEKAMYRRQRRSRLRYRKSRFNNRKRSKDWLSPSIQHKYDSHIRFIDKLKKLLPITNIIIEVANFDTHKLKDPSIEGAAYQNGEQKDFFNLREYILHRDAHKCQNPNCKNKSAEPILQVHHIGFWKQDRSDRPGNLITLCNKCHTPKNHKEKSFLYGWQPKVKSFKEATFMSMIRWRLVNTLGCKYTYGYITKYNRITLKLEKTHYNDAFCIAGGSNQNRVKPLIFEQIKRNSRSLQKFYDAKVIDIRTNTKVSGAELFNGRRTRNKNLNSENLRKYRGVKVSKGQRRIRTKRYFYQPGDLVKYEDKVYTVKGTQNKGKYIALKELKKVPKVELLAPYKFRKGLVCV

SEQ ID NO: 23189 - protein, 518 aa, Erysipelotrichaceae sp.; identical to SEQ ID NO: 7410

SEQ ID NO: 23190 - protein, 297 aa, unidentified; identical to SEQ ID NO: 15825

SEQ ID NO: 23191 - protein, 515 aa, unidentified; identical to SEQ ID NO: 13672

SEQ ID NO: 23192 - protein, 401 aa, unidentified
RRQRRAKTNGTISKKCVKQTTAQNGSVSKRAKEIGVIKRHLPGCEKDVLCIGIKNKEAKFTNRARPEGWLTPTANQLLQTHINLVKKIQKFLPISDVVLEVNKFAFMQLDNPNIQKWQYQQGPLYQKGSLENAVSEMQEHHCLFCEKPIEHYHHVVPKSENGSNTIANIVGLCTEHHNLVHKDATRQKKLAKEKVGLVKKYSALSVLNQIIPALTKEMNSLFPKHFFVTNGKSTYDYRTAHGVSKDHWLDAYCIACSVLPNDVCDSNINSHVPYELKQFRRHDRRVLHKANMSRVYTLNGKTVATNRHKAIKQTTDSLEEFRQSHPGDVCKLKVKEHHPAYRNLNRNYPGSVFLVDGQVHVMQGVSGSHNGKADGYYNTNGNAYPYYKCKFVVKNEGIVFA

SEQ ID NO: 23193 - protein, 431 aa, unidentified; identical to SEQ ID NO: 2977

SEQ ID NO: 23194 - protein, 396 aa, unidentified; identical to SEQ ID NO: 4508

SEQ ID NO: 23195 - protein, 205 aa, unidentified
MVYVQDIDGKPMMPTTRHGKVRQLLKDKKAVVINTCPFTIKLMYKTSDYKQEIVLGVDAGTKHVGLSATTKSKELYSGEVILRSDIVELLSTRRESRRTRRNRLRYRKPRFNNRIKSKRLGWVAPSVRHRIDAHIRVIDNICSILPVSRVIVEVAQFDTQKIKNPDISGDEYQEGDQLGFWNVREYILARDGHKCQHCKGKSKDP

SEQ ID NO: 23196 - protein, 452 aa, unidentified; identical to SEQ ID NO: 4732

SEQ ID NO: 23197 - protein, 485 aa, unidentified
DVFAGIDSGRENIGSGASNEDGDCLYLGELKTSNKSIKMKMTERVGFRRERRKHDRQNKQRKARKDHTEIQNGNADICRTTISCKSVQISYPAAEKSVTHKIIRGKEGKFANRHRDEGWITPSARQLVQMHMNDLKSMCKILPISHVTLERVAFDFQKLENENIKVWEYGKGKLYGYDSPEEYIHDVQNGKCLVCGKPHIDYLHHIIPRSKGGSDKVSNIAGLCYDCHYGPMGVHNCQNTQDRLPELKSEANKQYKVSLLNSVMPVLIEEMDKFCKANSIMFSICEGHDTAKVRDMYDLQKDHCFDGFAISLVGRNVESVDVIPDRIYQKQRYKKKSKNIIQKRNCREYYDDKKLVAVNRHKGTDQKADSLEEYMNTYAETHTADECKNQFESLTVKPARRTYTFHKEGRICPFHIGDKVRYEKKNKIKGNTKVDTFICEGIRFVKDENKAEVKHNKTKSKKMKFCRVLESGCTPYVDYRKLALM

SEQ ID NO: 23198 - protein, 475 aa, unidentified; identical to SEQ ID NO: 13183

SEQ ID NO: 23199 - protein, 406 aa, unidentified
LDANNKQLTPTKEQKAWFLIRKKRATLVSKYPMVIQLKKKIPDKEICKDEVRCGIDDGGLHVGVALVQKCHTRNKVIFKGVIEQRNDVKHLMDVRRGYRRYHRYHKRYRPARFNNRNSSKREGRITPSILQKRQATIRVVNQLNKWINITNYWLEDVAIDIRALTDGYKPYRWQYQKTNRLDENIRKAVILRDGCKCMECGKSNCRLEVHHIKPKRLKGSNTLGNLITLCAKCHQKTESVEELYMDRYFALLKSSDNKNLNYAQHVMIGKKWLREQLSNLGMLHLTNGGDTANKRIDWDITKSHSNDAICITDLKPDTCEIKEWVIKPMRRQSKAKADNVLGIKHRDLVEYTFRNGETHRGYVTALYPEQNAINFQSPTKHCKKVNARKCKVLWKYSKIYWLDNVS

SEQ ID NO: 23200 - protein, 444 aa, unidentified; identical to SEQ ID NO: 19934
  source 1..444: note = Microcoleaceae bacterium UBA9251

SEQ ID NO: 23201 - protein, 438 aa, unidentified
VLGKVFLVDTNKQPLDPVHPGWARKLLNTGQAAVLRRYPFTLILKKQVAEEVARPLRLKLDPGSKTTGFALVDDPSGEVVFAAELTHRGQQIKNALHARRAVRRWRRQRKTRYRAPQFDNRRRPKGWLAPSLESRIATTLTWTRRLMRVCPITEISMELVKFDMQLMDHPEIAGIEYQQGELAGYEVREYLLEKWGRRCAYCDAKDVPLQIEHLVCRARGGTDRVSNVCLACEPCNRKKGTQDISAFLKRDPVRLARILAQAKAPLRDAAAVNTTRWVLYERLKTFGLPIECGSGGLTKYNRVKLGFPKAHWTDAACVGKSTPQTLCIKGVTPLLITAMGHGSRQMCCMNKWGFPRTGPKAARRVKGFQTGDIVRAVVPTGKYAGRYTGRVAVRRSGSFDVTTANAKVQGISYRFCSALHCCDGYDYRKGGAAFSPAP

SEQ ID NO: 23202 - protein, 411 aa, unidentified; identical to SEQ ID NO: 2867

SEQ ID NO: 23203 - protein, 408 aa, unidentified; identical to SEQ ID NO: 11651

SEQ ID NO: 23204 - protein, 413 aa, unidentified; identical to SEQ ID NO: 5477

SEQ ID NO: 23205 - protein, 426 aa, Anoxybacillus sp.; identical to SEQ ID NO: 20281

SEQ ID NO: 23206 - protein, 453 aa, unidentified
MPVAVISKTGERLMPTSEYRARKLLKSGKAIKYSYHPFTIQLTERESGDVQPIELCVDTGYIHIGISVKSEKHEYLAEQIDTLTDEKARHDACRMYRRQRRSRKRYRQPRFNNRKRNDRWIAPSLEHKKSVHIQAILRICKVMPVTDITLEMGNFDTQVLKAREEGKPLPQGVDYQHGERYGITTLREAVFARDGYTCQCCGRAIKDGAILHVHHIVYRSQGGTNRMSNLITVCDKCHTQANHKQGGKLYNWKPKIASFKGATYMTTIRWKLYNEVKALFPDIDIDIDITYGAETKERRRALDIDKSHVNDAFVMGQFHPKHRSKPICYKKKRRNNRCLEKFYDAKYIDSRDGKKRSGQELFNGRISRNHKKDSENLHQYRLQKVTPGRRAIRRQHYPIQPHDIIVYNGNKIEVSGCQHKGTRVVFSKTKKSVQISKIKLFKYAGGYSKSVFN

SEQ ID NO: 23207 - protein, 479 aa, unidentified
VRSKGNWLTRRHKKNMQKLEERNTYTPTNIPHVCGNCGLVLNVEETLSVSGLKTSSNNSDAALTATGQAGQDLRVPAVYVLGMRGEPLMPTTTRKARVLLKEGTAKVIKRTPFTIQLLYATGETKQSVTLGVDSGYSKIGLSVVTDKKELYSAEAKLRTDIVKLNSERRTYRRARRCRKTWYRKPRFLNRKTLEGWLAPSIQHKLDSHIKLIDNIKGILPVSNIIIEVAAFDIQKIKNPEISGIGYQNGVQTDFWNVREYILYRDDHICQHCKGKSKDKILEVHHIKSKQVGGDRPDNLLTLCSGCHDKVSKGKIELDIKPANGFKAETYMSTVRWKLLNKLGEMGNVASHSYGYITKQNRIALGLPKSHTNDGFLIAGGNGQKRTTVEYLIKQVRNCNRKLFKGDRSHIKNTAERFIHGFQRYDKVLWNGIECFIFGRRTSGYFDLRKLDGTKVHASAKAEHLKLLERANTFLMEVRG

SEQ ID NO: 23208 - protein, 416 aa, unidentified
MVYVLSQNGQPLMPTENHAKVRVFLKQGKAKVVQRCPFTIQLLYESTTHTQKINLGIDAGSKTIGVSATTDSKVLYEAEVVLRNDIVELLSGRRALRRSRRNRKTRYRKPRFDNRKKPDGWLAPSIRQKIETHVTVVENITKILPMTKIIVETASFDIQKIKNPEIEGAEYQHGEQLDFWNVREYVLFRDGHTCQCCKGKSKDNILNVHHIESRKTGGNAPNNLITLCETCHKAYHKGIITLPKEIHRGMRFRDAAFMGVMRWAFYDRLKELYNPLGAEVINTYGYITKNTRITYDLPKEHYVDARCISGNPAAKPMDYYYLQKKVRCHNRQIHKCKINKGGTRKRNQAAYEVKGFRLYDQVLWKGQKCFIFGRRSTGRMDLRLLDGTHINASVGHKNLKLLSMRKNYLIEQRKAG

SEQ ID NO: 23209 - protein, 427 aa, unidentified
MPDKVYVISRLGHPLMPCSPAKARHLLDDKKAKVVKRMPFTIRLLYGSTKYIQPIILGVDAGSKTIGLSASTAKGEVFAAEVMPRNDVVENLSTRREFRRARRNRTTRYRKPRSDNRVRSNHERWLAPSVKVKIQEHITSIKRVCTILPISKVVIETAEFDLQLLKAIQEGKPIPEGEDYQKGEMYGSYNVCQYVLWRDNYTCICCGVRGTPKNPVRLHVHHFESRKYGGNAPDNHGTLCDDCHKKFHLGIIADVKLKTRRRQSTRDAAFMGIMRKTLMWRLRTELFIPVAETKGYITKATREKLLVLPKSHTRDALAIAQGRHGFSIKEYAYVEPANHIYTVRPVRHHNRQLHKASILKGGIRKRNQASKYVFGFRLYDKVLYQGKACFVWGRRTSGTFLLRTKVKDGVSYRNLTLLERSSNYLIA

SEQ ID NO: 23210 - protein, 412 aa, unidentified; identical to SEQ ID NO: 6973
  source 1..412: note = Lachnospiraceae bacterium UBA7767

SEQ ID NO: 23211 - protein, 432 aa, unidentified; identical to SEQ ID NO: 16069

SEQ ID NO: 23212 - protein, 421 aa, unidentified; identical to SEQ ID NO: 4235

SEQ ID NO: 23213 - protein, 459 aa, unidentified; identical to SEQ ID NO: 11427
  source 1..459: note = Cyanobacteria bacterium UBA11153

SEQ ID NO: 23214 - protein, 415 aa, unidentified; identical to SEQ ID NO: 10543

SEQ ID NO: 23215 - protein, 430 aa, unidentified; identical to SEQ ID NO: 16689

SEQ ID NO: 23216 - protein, 431 aa, unidentified; identical to SEQ ID NO: 4463

SEQ ID NO: 23217 - protein, 421 aa, unidentified; identical to SEQ ID NO: 19757

SEQ ID NO: 23218 - protein, 477 aa, unidentified; identical to SEQ ID NO: 5307

SEQ ID NO: 23219 - protein, 442 aa, unidentified; identical to SEQ ID NO: 10903

SEQ ID NO: 23220 - protein, 415 aa, unidentified
MIYVRSKAGKVLMPTERCGKIGYLLRHGMAHVVSRVPFVVQLDYESFTYTQDVSLGIDAGSKHIGVSASSKKKELFAAQVELRSDIVSLLSTRRELRRTRRYRKTRYRKARFDNRRKKDDWLAPSVEQKVDSHLKVIRLVHGLLPITNTTIEVAQFDTQKIKRPDIKGEEYQQGEQMGFWNIREYVLARDGHRCVHCKGKSKDPILNVHHLESRKTGGDSPGNLVTLCETCHKAYHRGEFELKIKSGISLRDAAVMNIMRWAVYGRAKAEFENVHLTYGYITKHMRIENGIAKTHTADAFCIAKNVHARRSRTFFQCRCVSRHTRALHVCIPKRGGMRRSSIASHKIGKSRFQRFDMVRWKGRECFISGSTCGRPVLRDIEGIKMHDKQSVSIKTVKFLKRIRNNIAICERTLVL

SEQ ID NO: 23221 - protein, 409 aa, Desulfosporosinus sp.; identical to SEQ ID NO: 2993
  source 1..409: note = isolate UBA5188

SEQ ID NO: 23222 - protein, 443 aa, unidentified; identical to SEQ ID NO: 16875

SEQ ID NO: 23223 - protein, 522 aa, unidentified
MATDFIYVLDTDGTPLAPTHRHKHTRMLLKNGQAKVVCYRPYTIQLLYESETPRVVPQLIAGQDPGRTNQGTNVIDRTGKSVYAAHIETRNKEIPTLMKNRSANRRASRNGERARRIRKAKLHHTTFQYGDHNRKLPKCNETVPIHYIINTEAKFCCRTRPDGWLTPTANQLLQTHISEVKQLMKILPITDFVIELNKFDFAKLKDPTLQKWQYGKGSLYQTNLKDLIDEEQDHHCLLCKNPIEHYHHIVHKADNGSDTVENMVGLCKKCHTRVHKNQKVEEKVLSKKEGLEKKFAGTSILNQIFKPYITWLIKTFGEDHVFITDGKTTAKFRNNHNIPKTHELDAYCIACSILENPIINYDCVVFEEKQFRHHNRQLINSTRERKYYHVDRVKTTKTLKNGKQVVKTELKNKTLVATNRKKRMDQKTDSLREYHMKLRQKYDKQTVKKMISELVVVKSTRGYRDQNTIMPGAVFMYHGKHYVLSGTSNQGQYFRAVGQGKTNFPTKDCKIVRKNTGLVYLY

SEQ ID NO: 23224 - protein, 420 aa, unidentified
MQYVYVLNKHGEPLMPCSPGKARILLKQQKACVVKRTPFTIKLLYGSAGYKQPITLGVDAGSKHVGLSASTEKRELYSEEFTPRNDVVELLSTRRQNRRSRRNRKTRYRAPRFNNRIHSKHKGWLAPSVEVKIQEHITVIKRICRILPITLVRVETAEFETQRLKAMLSGKPLPVGTDYQLGEMYDEYNARQYVLRRDNYTCQRCGAHTTKKKTVKLHVHHLESRKTGGNAPSNLITLCVDCHKAFHAGKVKLDGKKRGKSLKDAAFMGAMRNTLLTRLRNELNIPVQNTYGYITKLLREQNDIKKSHVNDARCISKHPLAEPCSVCYRTKAIRHHNRQTHKANFSKGGIRKRSQMPYLVEGFRLWDKVLYKGQECFVSGRRSSGSFALKKLDGTSISKGVTFKKLRLLEPATNYLIERM

SEQ ID NO: 23225 - protein, 431 aa, unidentified
MPNKVYVINKHGRPLMPCSPAKARHLLDAGKAKVKKRTPFTIQLVYGSSGYTQEVILGVDAGSKTIGMSVSTTKEELLSAEVKPRNDVVDLLSTRREFRRARRNRKTRYRKPRFDNRVRSKHKGWLAPSVEVKIQEHITTIRRVYGILPVSKVVVETAEFDLQLLKAIADGKPVPQGEDYQKGEMYGHYNVRQYVLWRDDYTCQCCGAHATKKKEVRLHVHHLESRKVGGDAPDNQVTLCESCHEKLHKGLIAEKDFKKRKRRSTRDATFMGIMRKTLMQRLYSELPIPVIETRGYITKATREKLLVLPKSHTNDALAIAQGKRGFNVGYLPEIAQIDKIYTIRPVRHHNRQLHKAAILKGGIRKSNQVGKYVFGYCLFDKVQFNGQDCFIWGRRTTGIFTIKTINGKMIKDGISFKKLKPVEKSTSYLIA

SEQ ID NO: 23226 - protein, 428 aa, Enterococcus sp.; identical to SEQ ID NO: 4335

SEQ ID NO: 23227 - protein, 472 aa, unidentified
VVDNRLLSIKPLINIGEGVIYSSICTGLSLQTYQKRKEVPCMVYVLDINGQPLMPTTRHGKVRRLLNSHLAKVVKRCPFTIQLLYQSTKEIQPVSLGVDAGSKHIGMAATTEKKVVYQEELSPRNDVVKLLSLRRASRSSRRSRKTRYRKPKFNNRVHSKHKGWLAPSVEVKIQEHITAIKRICQILPISEIQVETAEFDFQRLKAMKEWKPLPVGTDYQLGEQYDFYNTRQYVLHRDGYTCQCCGTHDNNIKLHVHHIESRQTGGDAPSNLITLCEHCHKALHKGKLELPKGKKRGKTYRDATFMGIMRKTLLERLRKEVDIPVSGTYGYITKYLREKTDLEKSHINDAICISKYPYAKPLDTYYLTKMVRNHNRQIHKSNFSKGGIRKHNQAPYLIKGFRLFDKVLYQGKEYFIFGRRATGYFDIRTLDGTKVNKGSISYKKLRIQDTAKAYLKEARAIPHMNKFTCVLA

SEQ ID NO: 23228 - protein, 473 aa, unidentified; identical to SEQ ID NO: 3562
  source 1..473: note = uncultured beta proteobacterium

SEQ ID NO: 23229 - protein, 429 aa, unidentified
MLVYVLKQNGQPFMPTKRFGKVRRLLKTKKAKVVRREPFTIKLLYEPETDVVQECYCGVDTGSRHIGVAVVSNDKVLYQSQTELRSDIKRKMDARRMYRRNRRQRKTRYRKPRFLNRKNSIKKDGLLPSVKHKVQAHIDEIEFCKKILPISDSNLVIEVSQFDTALMKDPSLNSEKIKHWGYQQGFNYGYSSRREAILHRDNYTCQCCGKKNCRLEVHHVKFKSNDGTDDEENLITLCEDCHKGVHAGTVVLSKKPKKSKNLKYATHMSIIRSYLLKRYPNAIETFGFVTSENRNHLNLPKDHYIDACVIASGGLEIKQLDVIFYKRRVSKGNYQLTKGVRGELKIPTGKICGFRKFDKVEYLGNVYFIKGRMSKYGYCFLTDIFGNKIDFSCMTRGTKTPKLSSCKRISARSSCLCIRKKITLNINNI

SEQ ID NO: 23230 - protein, 477 aa, unidentified; identical to SEQ ID NO: 8085

SEQ ID NO: 23231 - protein, 421 aa, unidentified; identical to SEQ ID NO: 11150

SEQ ID NO: 23232 - protein, 369 aa, unidentified
VDTGSGTIGTAVSNDNSDIVYMSEVIVRNDIMDKMTQRRKYRKNRRGRKTRYRKARWLNRANSTKTDRFSPTMQSKLHSHVKEIEYIKSILPITTMVFETGQFDTHLMKNPNLANPKVKHWGYQKGGNYGFENTKAMVLNRDNYTCQCCKGKHKDSKLEVHHIIFRSQGGSDEESNLITLCHTCHKDLHSGTINFKLKGKLKGNLKYATQMNSIRKQLFRIYPYAIETFGYVTKANRLVLGIDKEHYYDACTIATQGNIFTVKSNLYKKKCVSDGDFQKTKGIRSEQPIVTDKICGFRKFDKVRYFGNDYFIKGRMATGYAVLMDIDGNKADFSAMPKGYKTPKMVKLKRIEARTTWMITTVEVTPNIA

SEQ ID NO: 23233 - protein, 470 aa, unidentified; identical to SEQ ID NO: 2825

SEQ ID NO: 23234 - protein, 426 aa, Hydrocoleum sp.; identical to SEQ ID NO: 20690

SEQ ID NO: 23235 - protein, 407 aa, unidentified
MPTTRHGKVRRLLNNHLAKAVKRCPFTIQLLYQSTKETQPVSLGVDAGSKHIGLAAATEKKVVYQEELIPRNDVVKLLSVRRALRYSRRNRKTRYRKSRFNNRVHSKHKGWLAPSVEAKIQEHITAIKRICQILPVSEIHVETAEFDLQRLKAIEEGKPLPVGTDYQLGEQYDFYNTRQYVLHRDGYTCQCCGTHDNNVKLHVHHIESRQTGGNAPNNLITLCEHCHKALHEGKLKLPKGKKRGKSYRDATFMGITRKTLLERLKKEVDVPVTGTYGYITKYWREKAGLEKSHINDAVCISKHPYVEPLDTYYLTKAVRHHNRQIHKVNFSKGGIRKRNQAPHLVKGFRLFDKVLYQGKECFIFGRRVSGRMDIRLLDGIRINASVGYKNLELLELRKAYLTERRTC

SEQ ID NO: 23236 - protein, 442 aa, unidentified; identical to SEQ ID NO: 9771

SEQ ID NO: 23237 - protein, 470 aa, unidentified; identical to SEQ ID NO: 2949

SEQ ID NO: 23238 - protein, 475 aa, unidentified; identical to SEQ ID NO: 6136

SEQ ID NO: 23239 - protein, 439 aa, Lactobacillus sp.; identical to SEQ ID NO: 17618

SEQ ID NO: 23240 - protein, 423 aa, unidentified
MVYVLNIDGQPLMPTDRHGKVRHLLKDGRAEVVKCCPFTIRLLYDSTHYTQDIVLGVDAGSKHIGLSGTTETKELYASDVELRNDIVDLISTRRQNRRSRRNRKIRYRKARFQNRVSDKKDWLAPSIRQKVDTHMTVVSRVCKILPVTKIIVETASFDIQKIKDPDISGTGYQHGEQLDFWNVREYVLFRDGHTCQCCKGKSKDPVLNVHHIESRKTGGDAPNNLITLCETCHKGYHSGAVQLPKAIHRGMRFKDAAFMGIMRWAFYNKLKEVYEPQDIEVSMTFGYLTKNTRIRHYLPKEHYIDARCISGHPEAIPSNEVFYQKKVRCHNRQIHKNTILKGGVRKRNQAGYLVKGFRLFDKVAYKGREYFIFGRRQSGFFDLRNLSGCKVNKGSLSYRKIGFLEPRQYYLCERRVMDTQGCA

SEQ ID NO: 23241 - protein, 420 aa, unidentified; identical to SEQ ID NO: 7078

SEQ ID NO: 23242 - protein, 416 aa, unidentified
MVYVLDKNGQPLMPTDRHRKVRLMLQSGQAKVIKRCPFTIQLNYDSGHQTQEISLGIDAGSKHIGVSATTKIKVLYEADVELRNDIVNLLSSRREFRRGRRNRKTRYRQAKFNNRRRGNGWLAPSIRQKIGTHLTVVENICKMLPISRIMVETASFDIQKIKNPDIQGAEYQQGDQLEFWNVREYVLFRDGHICQCCKGKSKDKILNVHHIESRKTGGNAPNNLITLCETCHTGYHKGTVQLPKAIKRGMRFKDAAFMGIMRWAFYEALKQQYEPVGTPVHNTYGYITKHTRIAYNLPKEHYVDARCISGNPEASSNGEYYYQKKVRCHNRQIHKLTVLKGGIRKQNQATYLVKGYRLFDKVSYQGKGYFVFGRRQSGFFDIRTLSGEKVNKGSLSCKKLKFIATRTHYLTERRAV

SEQ ID NO: 23243 - protein, 422 aa, unidentified; identical to SEQ ID NO: 5333

SEQ ID NO: 23244 - protein, 421 aa, unidentified; identical to SEQ ID NO: 19222

SEQ ID NO: 23245 - protein, 424 aa, Moorena sp.
MRVFVLDKNLKTLDPCRPARARLLLKQGRAKVFRRYPFTIILSDLEVENCTTHHHQLKIDPGAKTTGLAIRQNNTVIWGAEITHRGFQIRDALTSRRELRRSRRNRKTRYRKPRFLNRKRPERWLAPSLMSRVHNILTWVKKLIRFCPIAGISQELVRFDTQKTENPEISGTEYQQGTLYGYEIREYLLEKWNRKCAYCGTTDTKLEIEHIKPKSLGGSDRVSNLAIACHDCNQAKGNQEIKQFLSGKPDVLKRILSQAKRPLADAAAVNATRWKLYKELKSTGLPVETGSGGRTKYNRCRFNLPKTHWLDAACVGNVQSIYVENYQPLLIEAKGHGTRQICRTDKFGFPKRYCSRTKIHKGFQTGDIVKAVVTKGKKIGTYVGRVATRKTGSFNISTANGLIQGISHKYCQPIHKKDGYAYTI

SEQ ID NO: 23246 - protein, 386 aa, unidentified
VLQAPNPVQHWRRMSTGLRAVQAEPAGIRKGDALKVFVLNMRGRPLMPCSPAKARHLLKAEKAVVKRRTPFTIQLRIATGETKQNVTLGVDAGAKHVGLSATTEKEEVFASEVELRQDITGLLAARLSLRRDRRHRKTRYRAPRFLNRVRSKHKGWLAPSVENRIQAHMSRIDAVCRLLPVTKIVIETASFDIQKIRNPEVEGTGYQQGDQLGFWNVREYVLFRDGHVCQHCHGHSKDKILNVHHLESRKTGGDAPNNLITLCETCHKAYHAGKIKLKVKRGQSFRAEAFMGIMRWTLLDRVRKAHPGLPVENTYGYLTKHKRIALGLPKTHCADAFCIAGNLKALRRGDFLFQQQTRKHNRQIHKEALQKYPEQSFAQKFGLCNR

SEQ ID NO: 23247 - protein, 477 aa, unidentified; identical to SEQ ID NO: 2707

SEQ ID NO: 23248 - protein, 436 aa, unidentified
MTKTLTTQTTQACLLDQNGKPLMPTTRLGKVYRLLKTQKAHIVSYEPFTIQLDYEPDTHIIQPMTLGVDSGAIHSGYSVANEHREYYSAEIIARNDISNRLSDRRMYRQTRRSRKTRHRKPRFNNRKNKKKGWLPPSLEQKVATQLNEIDHLHRYFPIETIIVEVAEFDIQKIKNPDILGIEYQQGTLQGYNIRNYLLEKHGRKCFYCGKTVSDFEVEHMFPKSKGGSNRIDNLTLSCHDCNEKKGTLTAEEFIQQTLPAKKAVVKLKQLPNEKRLFKYMAYMNATRWALYDAIKERYPNVKMTYGYITKYERIQAGLPKTHHIDAKCITGFATVPSMSQTVVKVKMRRHNRQLHRATFSKGHIRKVACLPTVTFGFQLYDLVLFDNHRYYIKSRRSSGAFALVSVEGLKDENRNYKKLTLLAHTNAYLTNRYVNA

SEQ ID NO: 23249 - protein, 535 aa, unidentified
VLRPRYQYPTRWYPSREQGSGNGCLPGEEGTDLEQEVSGTLSKGDHSHPGEQDFCVPAITIQGGPAMSVFVVGLNGCRLMPTSERKARLLLKHGKASVYRKVPFTIKLNYKTGSTTQSGYLGIDTGSQHIGVSVVREDGTVLHKEEIGLRDSMSKRKLMQSRASSRRGRRHRKTRYRHPKWRPKAKRVYCEIPDRKGRHWKKKEITFASKRAKGWLPPSLQSKTDHHIWWIKKLQDLLPEGYRLSIELGRFDPARLKDPEIHGELYQKGPQYDYENVRAYVLNRDRYTCQVCGKKGGKLHVHHILYRSHGATDDPQYMATVCSDCHNTENHQQGGILYQWMQKQKKFTRGLRDATFMNILRKRLIEAFPGATFTYGNITKADRERLRLPKSHGNDATAIAIVKTGIMTVKDKEPVIYIQQVRRKKRSLHEETPRKGRKEPNRKASRYDKNTKAVTVTKRKNKKISITGCLFDRVELNGKKGWISGFTDKSCYVKDENGQYIRTSPKYKQVSLSKLKILHHCGNWAIGARQSLGKG

SEQ ID NO: 23250 - protein, 465 aa, unidentified; identical to SEQ ID NO: 15318

SEQ ID NO: 23251 - protein, 289 aa, unidentified
LKGFDNRDAAVYDLQDGKCLLCRKEIEHYHHIVPKSRGGSNTLGNIAGLCKSCHDRVHKDTMYAKRLEDLKKGLDKKYGALSVLNQAVPFLCQRLEQEFGKEHVFYCTGRDTARVRTALGYQKTKENQLHEVDAWCIGLLALGKAPEKLPEFYTHRILQFRRRDRSLIDAQVERTYKLDGKTVAKNRKKRTEQKTDSLEEWFEKQVKAFGKKEAKRKRSRLTVVKAYRRYNDPDRLMPGAVFLYQGVRYVMRGRHCKGAYLQAVGMGSKDFPVKQCKILKQNTGLVFVA

SEQ ID NO: 23252 - protein, 414 aa, unidentified; identical to SEQ ID NO: 10282

SEQ ID NO: 23253 - protein, 387 aa, unidentified
KAHVVSRVPFVVQLDYESTTYTQEVSLGIDAGSKHIGVSASSEKKELLAAQVELRNDVVNLLSTRRELRRTRRNRKTRYRKVRFDNRKRKDGWLAPSIELKVESHLKVIRLVHKLLPITKTTIEVAQFDAQKIKNPDIKGEEYQQGEQMGFWNVREYVLARDGHRCIHCKGKSRDPILNVHHLESRKTGGNSHSNLVTLCETCHKAYHRGEFELKIKRGSSLRDAAVMNIMRWAVYERAKEEFGNVNLTYGYITKHTRIENGIAKTHAADAFCIAKNVHAMRLSSFFMCRCVPRHTRALHVANPKKGGIRRSCIASHKIGKSRFQRFDMVRWMGKECFIFGSTNGKPVLRDIKGIKMHENASVNIKTIKFLRRLRNNILMEEKTSES

SEQ ID NO: 23254 - protein, 460 aa, unidentified
MSVFVISKNSERLMPTNRLGKVRHMLKDGRAIIYQRNPFTIQLTYETTEYVQPVELCQDTGYQHIGTSVKSESEEYVAAQHDLLLSEKGNHDDCRKYRRDRRNRKRYRAPRFDNRRAAKKPGWIAPSLRNKADRHIDIIRRYIAVAPITSVTIEIGQFDPQVLKAVAEGKPIPTGIAYQHGPMYGIDTLREAVFQRDKHTCIFCGRGLKQGAVLHTHHVYFWRDQHGDSLDELATCCEKCHTPKNHKKGGKLWGYDKKLPRYSGAAFMNTVRWYIYNQLQEYFPDTEIHITYGAATKRARLDLGLDKSHVNDAFAMGKLHPGKRAKAQLFVKRRRNNRCLEKFYDAKYIDVRDGKVKTGAELGCQRINRRELRISDKSQRIYRGKKKSSGRRSVRKQRYSIRPGDVLICNNRKTTAEGVHCNGTRVTIERQSYSIKNITLLYHMGGWIKTTINGKISKTT

SEQ ID NO: 23255 - protein, 451 aa, unidentified
MKVFVKNMRGQALMPCSPRKARILLKQKKAKVVDYRPFTIQLCYPTGEAKQEVIIGVDQGAKHIGIAVVSQGKVLAKGEVELRQDVHSLLQTRAEYRRGRRYRKTRYRKARFLHRTRPEGWLPPSIRGKLDANFAWIDKFCSLVPNPKLRIEVGKFDTAKMINPDIKGVDYQHGQTYGYYDVRYFVFARDNYTCQVCHKKNKILHTHHIIYKSKGGSDRADNLITVCTECHTHDNHQEDGILYQWMLKHKKTKQYKEPPFMNILRIRTYKKYSEADITYGSVTTERRKVLELEKTHYNDAIAITGIEKIDKNIDECFWIKQFRKKKRSLHEATARKGRKEKNIKAKRNSKNTKQVNGWFLNDEVICYGKRGWITGFNSAASSSPAAFVVDKDGNYITVPGKSYKQVNLKSLKLIRHNNNWQYAIAKEEKSAASPEIPLPPVEVRESFLAAC

SEQ ID NO: 23256 - protein, 354 aa, Erysipelotrichaceae sp.; identical to SEQ ID NO: 10388

SEQ ID NO: 23257 - protein, 482 aa, unidentified
MKQKLSVKLKNTPRDTSLVSCSGSSVLNKEETLSVQNIVLTDNISEENHSQHRGSSDLRVQNIVYVLNMRGEPLMPTTQQKANKLLRKKKAKVITTKPFTIQLNYPTGENIQLITLGVDAGYLKIGFSAITNTKELISGEVQLRNDVSKKLSERRMYRRNRRNSLWYRKPRFNNRASSKKKGWLAPSIQHRLDSHIRLIEIIKKILPISEIVVEVASFDTQKMQNPEIIGVKYQQGELQGYEVKEYLLEKWNRKCTYCKKTNIPLEVEHIVPKSRGGSDRVSNLTISCSKCNQKKGNKTAEEFGYPEIQEKANKSLKMTAFMNSVRWKLVKQLNKVMPYSVSHTYGYITKYKRAELGLSKSHINDAFMITNGINQKRCKPFTITQTRRNNRSIQLNRKRFKRSIRRQRYKFQPNDMVRFNRNIYKVKGVFNYGTWVRLSDDFNIINTNIKNVSLLTYGKGLQFRCPIHLPPNSNDFGRSLLG

SEQ ID NO: 23258 - protein, 466 aa, unidentified
LSIKSLINIGEGVIYSSICTGLSLQTYQKRKEVPCMVYVLDINGQPLMPTTRHGKVRRLLNSHFAKVVKRCPFTIQLLYQSTKEIQPVSLGVDAGSKHIGMAATTEKKVVYQEELSPRNDVVKLLSARRTLRRTRRNRKTRYRKPRFNNRVHSKHKGWLAPSVEVKIQEHITAIKRICQILPISEIHVEISEFDLQRLKAMEEGRTLPVGTDYQLGEQYDFYNTRQYVLHRDGYTFQCCGTHDNNIKLHVHHIESRQTGGDAPSNLITLCEHCHKALHKGKLELPKGKKRGKTYRDATFMGIMRKTLLERLRKEVDVPASGTYGYITKYWRERAGLEKSHINDAICISKYPYAKPLDTYYLTKAVRNHNRQIHKSNFSKGGIRKRNQAPYLVKGFRLFDKVLYQGKEYFIFGRRATGYFDIRTLDGTKVNKGSISYKKLRIQDTAKAYLKEARAIPHMNKFTCVLA

SEQ ID NO: 23259 - protein, 538 aa, unidentified
AKASSSQGKHNLLLRQERLIVKEVAYMSTVYVLNKDGKPLMPTTRCGHVRHLLKEQKARVVTSKPFTIQLLYEADDVVQSLCLGIDPGRTNIGVAAVKADGTAVFTAHLETRNKEIPKLMKKRKESRRARRTNGRRCRRQRRAKANGTISKKCVKNDTAQNGSVSKRAKEIGVIKRHLPGCEKDVLCIGIKNKEAKFSNRTRPEGWLTPTANQLLQTHINLVKKIQKFLPISDVVLEINKFAFMRLDNPNVQKWQYQQGPLYQKANLEETVSEMQEHHCLFCKKKIDHYHHVVPQHKNGSNTIDNIIGLCTQHHDLVHKDATWQKRLAKKKTGLNKKYGALSVLNQIIPALTKELSSLFPKHFFVTNGKSTYDYRAAHGVSKDHWLDAYCIACSVLPNDTCDKTINSRVPYELKQFRRHDRRALNNENMSRVYTFNGKMVATNRHKATEQTTDSLEEFRQRQPNDVCNLKVKEHHPTYRNMNRNYPGSVFLVGNQVHVMQGIAGSKDGEATTYKDTNANSIAAGKCKFVAKNSGILFV

SEQ ID NO: 23260 - protein, 477 aa, unidentified; identical to SEQ ID NO: 2707

SEQ ID NO: 23261 - protein, 431 aa, unidentified
MQRVLVVDTNRQPLMPCHPARARELLNRGKAAVYRHYPFTIILKERAGGNMQPVACKIDPGSRQTGIALVADFQRGKRLVWAAVLEHRGEPIKAALLARRQSRRSRRNRHSGYRPARFDNRRRPQGWLPPSLQSRVANLMTWVKRLYGLTPVKSLSMELVKFDTQLMQNAEINGVEYQQGELVGYEVREYLLEKWGRQCAYCRAKDIPLEIEHITPKSRGGSNRVGNLTLACHACNQQKGNQTAAEFEYPEIQKRARQPLKDMAAVNATRWALFGRLQSTGLSLEVGTGGRTKFNRTHQAYPKAHWIDAACAGKSGEKVYLNPHQMYLHIKATGHGTRQMCRTDKYGFPIRHRLHQKRHFGFQTGDTVMAIVPAGKYSGTHLGRAACRATGSFDLKTDTGKVTVSYKHLKTIHHSDGYTYTKGSGAVPPYG

SEQ ID NO: 23262 - protein, 427 aa, unidentified; identical to SEQ ID NO: 10130

SEQ ID NO: 23263 - protein, 433 aa, unidentified; identical to SEQ ID NO: 5255

SEQ ID NO: 23264 - protein, 463 aa, unidentified
MSTCVCVLSNNGERLMPTIRLGKVRHLLKDGKAKIIKHHPFTIQLLYDSETNIQPIEICEDVGYNYIGISVKSQSHEYVSAQYDTLQDEKSCHDACRRMRRTRRNRLRYRQKRFDNRKRDKGWLAPSLKHKKELNVNVIKMYCEVVPITHATVEVGSFDTMLVKAIEEGKATPEGADYQKGPRYNLATLREAVFYRDNYTCQVCGREASEGAILHVHHMFYWKGRHDNSLSELITVCEKCHTPANHQKGGKLYGFGEDIKFANLSGAAFMNTVRWQIVNELYAAFGKPFVTFTYGAMTKEKRIALHLEKSHNNDAYAMGEFHPNCRCTFEHYEKVRRNNRILEKFYDSRYIDIRTGEIATGKELFNGRINRSHKKDSENLHKYRGKRIRKGYRALRRKKVALNPGDLVSLNGEILTVHGTHTKKNGSVNVEFKTPSKSGKKSTSLKKLKIIKTISPMRSAWDK

SEQ ID NO: 23265 - protein, 498 aa, unidentified
MTVVYVLSASGEPLMPTTRCGHVRILLKEKKARVVERNPFTVQLAYETEGVTQPLYLGIDPGRTNIGAAVVREDGECVFTAQLTTRNKDVPKLMKARKLYRMAHRRLKRRCKRQRRAKAAGTISPQKEIQRLLPGCEKPIICKGIRNKEVRFNNRKRPAGWLTPTANHLLQTHINLVKKLKKFLPITDVVLEVNQFAFMAMENPRIQRWQYQRGPLFGKGSVEEAVYAAQDGHCLFCAKGIDHYHHVVPRRKNGSETLENRVGLCEEHHRLVHTEDAWTKKLAAKKAGMNKKYHALSVLNQIIPTLTERLAELFPQHAFVTTGQGTYHFRENHDIPKDHYLDAYCIACSVLSNAQKVSHPKREPYDMRQFRRHDRQACHKANITRKYYDADGKLVAANRHKAMEQKSDSLVEYRENHSEVEVSQLRVKAHFPQYKEMSRPMPGSLLATNGGNVFTLMRSDGKHNGKADYFVDTQGIKHLTKRCILLQNNQGIIFAGIG

SEQ ID NO: 23266 - protein, 458 aa, Scytonema sp.; identical to SEQ ID NO: 6085

SEQ ID NO: 23267 - protein, 424 aa, unidentified; identical to SEQ ID NO: 5018

SEQ ID NO: 23268 - protein, 502 aa, unidentified; identical to SEQ ID NO: 6049

SEQ ID NO: 23269 - protein, 427 aa, unidentified; identical to SEQ ID NO: 4946

SEQ ID NO: 23270 - protein, 416 aa, unidentified
MVYVLDKNGQPLMPTDRHRKVRLMLQSGQAKVIKRCPFTIQLNYDSGHQTQEISLGIDAGSKHIGVSTTTKIKVLYEADVELRNDIVDLLSSRRELRRGRRNRKTRYRQAKFNNRRRGNGWLAPSIRQKIGTHLTVVENICKMLPISRIMVETASFDIQKIKNPDIQGAEYQQGDQLGFWNIREYVLFRDNHTCQCCKGKSKDKILNVHHIESRKTGGNAPNNLITLCETCHTGYHKGTVQLPKAIKRGMRFKDAAFMGIMRWAFYEALKQQYEPVGTPVHNTYGYITKHTRIEHNLPKEHYVDARCISGNPEASSNGEYYYQKKVRCHNRQIHKLTVLKGGIRKQNQATYLVKGYRLFDKVSYQGKGYFVFGRRKSGFFDIRTLSGEKVNKGSLSCKKLKFIATRTYYLTERRAV

SEQ ID NO: 23271 - protein, 428 aa, unidentified; identical to SEQ ID NO: 17256

SEQ ID NO: 23272 - protein, 381 aa, unidentified
FTIQLQYESTTHTKNINLGIDAGSKTIGVSVTTDTKVLYESEVVLRNDIVELLSGRRALRRSRRNRKTRYRKPRFDNRRRPDGWLTPSIRQKIKTHVTVVENVMKILPVTKIIVETASFDIQKIKNPEIEGAEYQYGEQLDFWNVREYVLFRDGHTCQCCKGKSKDNILNVHHIESRKTGGNAPNNLITLCETCHKAYHKGVITLPKEIHRGMRFRDAAFMGIMRWAFYDRLKELYTPFGVEVINTYGYITKNTRIEHGLPKEHYVDARCISGNPAAKPLGHYYFQKKVRCHNRQIHKNTILKGGIRKRNQAAYLVKGYRLFDKVKYQNQEYFIFGRRSSGFFDIRTLDGTKVNKGSISCKKLQLVEKSKHYLTEQRKVAA

SEQ ID NO: 23273 - protein, 410 aa, unidentified
MSYVFVIDQEKRPLDPVHPGRARKLLSSGKAAVYRRFPFVLILKHPVSEAHPQPLRLKIDPGSKTTGLAVLNDTSGQVLWAAELVHRGEEVHQALQKRAGVRRGRRSRHTRYRAARFSNRRRKRGWLAPSLCSRMQNVQTWTRRLMRWCPLGAISYEAVRFDTQAIQNPEIKGVAYQHGTLAGLEVKEYLLLKWRHKCVYCQKGDIPLEVEHIVPKRRGGSDRITNLTLACEACNQQKGSQTAQAFGFPHLQAQALQPLKDAAAVNSTRWALYERLKATGLPIEVSTGGQTKWNRKQRGIPKCHWLDAVCVGPSTPERVQWQHVIPLLITARGRQCRQLCNVDGWGFPRSRPKGPSKVFGFQTGDMVQAVVTRGKRMGTYVGRVAIKTDGYFKITGTHGMVEGIHGRHCP

SEQ ID NO: 23274 - protein, 447 aa, unidentified; identical to SEQ ID NO: 17762

SEQ ID NO: 23275 - protein, 420 aa, unidentified; identical to SEQ ID NO: 14093

SEQ ID NO: 23276 - protein, 400 aa, unidentified
LRVFVLNKRGKPLMPCSPAKARLLLKEKKAIVKRRTPFTIQLTIATGETKQPVGLGVDAGYKHVGLSASTDKAELYASQVELRQDITDLLSARRALRRARRNRKTRYRAPRFNNRIRTKRKGWLAPSVENRINAHLSRIEAVLRLLPVTKITVETASFDMLLLKNPDIAGKEYQEGEQLGFWNVREYVLFRDGHVCQHCYGRSKDPVLNVHHLESRRTGGDSPGNLITLCETCHKALHRGEITLKAKRGQSFRAQAFMGIMRREVLNRLKASYPELKVHETYGYLTKHARIANGIVKSHGADAFCIAGNLGAERLGEFFFQKQTRRNNRQIHKLSILKGGIRKRNQAPFEAKGFRLFDKVACQGEEGFIFGRRSSGSFDVRKLDGTRISAGISYKKLRLL

SEQ ID NO: 23277 - protein, 501 aa, unidentified
MTMRYVYVLDVDGKPLMPTCRYGKVRRMLKSGQAKTVDTLPFTIQLTYQTKTKILQPVTAGQDPGRTNIGLAAAREDGTDLYRSHCETRNKEIPKLMAERLAHRRASRRGERLARKRLAKKFGTIAKKLNGRLLPGYKEPLAVKDIINTEAKFNARLRPEGWLTPTATQLLRTHLNLLERVSRILPVTDVAIEINRFAFMELADPDKKHSEIDFQHGALFGTGGLEQAIREQQQDRCLLCGKRDIEHFHHIIPRTKRGSNTIANLAGLCEQCHTLVHQSEEAKNRLEEKKQGLTKQYGGTSVLNQIIPSLVKELEKRYPGQLHLMTGRDTKAFREKHGLEKDHDVDAYCIAASRMENIKPKIQTEPFEIQQFRKHNRANIHHQTERTYKLDGKVIAKNRKKRMDQKTDSLEDWFATMTEQYGLEKAMRLRARLTVKKSTRHYNTKDRIMPGLVFRYGTKRYVMTGQITGGRYYRAYGAGNQNFPAQKVTMLKQNTGLVYVA

SEQ ID NO: 23278 - protein, 346 aa, unidentified
LRQDITDLLSARRALRQSRRNRKTRYRAPRFDNRISTKRKGWLAPSVENRINAHLSRIEAVLRLLPVTKITVETASFDLQLLKNPDISGKEYQEGEQLGFWNIREYVLCRDGHVCQHCYGRSKDPVLNVHHLESRRTGGDSPGNLITLCETCHKALHRGEITLKTKRGQSFRAETFMGIMRWEVLNRLKASHSELKVHNTYGYLTKHARIENGIAKSHGADAFCIAGNLGAERLGEFFFQKQTRRNNRQIHKLSILKGGIRKRNQAPFEVKGFRLFDKVACQGEEGFIFGRRSSGFFDVRKLDGTRISAGISCKKLHLLEKRRTYLTEIRKEEALPPLPEGRGLRA

SEQ ID NO: 23279 - protein, 427 aa, unidentified; identical to SEQ ID NO: 14799

SEQ ID NO: 23280 - protein, 414 aa, unidentified
MPCSPAKARLLLKEKKAIVKRRTPFTIQLTIATGETKQPGSLGVDAGYEHVGLSASTEKAELYASEVELRQDITDLLSARRALRQSRRNRKTRYRAPRFNNRLCTKRKGWLAPSVENRINAHLSRIEAVLRLLPVTKITVETASFDLQLLKNPDISGKEYQEGEQLGFWNIREYVLCRDGHVCQHCYGRSKDPVLNVHHLESRRTGGDSPGNLITLCETCHKALHRGEITLKAKRGQSFRAEAFVGIMRWEVHNRLRALHPGIEVSNTYGYRTKHARIANGIAKSHCADAFCIAGNLGAERLCEFFFQKQTRRNNRQIHKLSILKGGIRKRNQAPFEVKGFRLFDKVACQGEEGFIFGRRSSGFFDVRKLDGTRISAGISCKKLRLLEKRRTYLTEIRKEEALPPLPEGRGLRA

SEQ ID NO: 23281 - protein, 436 aa, unidentified
MTKTLTTQTTQACVLDQNGKPLMPTTRLGKVYRLLKTKKAHIVSYEPFTIQLDYEPNTHIIQPMTLGVDSGAIHSGYSVTNEHREYYNAEVIARNDISRNLSNRHMYRRTRRTRKTRYRKPRFNNRKNKKKGWLAPSLQQKIAVQLNEIDHLHRYFPIETIIVEVAEFDIQKIKNPDISGIEYQQGTLQGYNIRNYLLEKHGHKCFYCGKTVSDFEVEHMLPKSRGGSNRINNLTLSCHDCNEKKGTLTAEEFIQQTLSAKKAVSKLKQLPNEKRLFKYMAYMNATRWALYDAIKGTYRNVKMTYGYITKYNRIHAGLPKAHHIDAKCITGFLTVPSMSQTVVKVKMRRHNRQLHRASFSKGHIRKIACLPTTVFGFQLYDLVCFNNHRYYIKSRRSSGAFTLASVEGLKNEKRTYKKLTLLAHTNAYLTNRYVNA

SEQ ID NO: 23282 - protein, 292 aa, unidentified
LSRIEAVLRLLPVTKITVETASFDLQLLKNPDISGKEYQEGEQLGFWNIREYVLCRDGHVCQHCYGRSKDPVLNVHHLESRRTGGDSPGNLITLCETCHKALHRGEITLKPKRGQSFRAEAFMGIMRWEVLGRLKASHPELEVNNTYGYRTKHARIANDIAKSHCADAFCIAGNLGAERLGEFFFQKQTRRNNRQIHKLSILKGGIRKRNQAPYEIKGFRLFDKVACQGEEGFIFGRRSSGFFDVRKLDGTRISAGISYKKLHLLEKRRTYLTEIRKEEVLPPLPEGRGLRA

SEQ ID NO: 23283 - protein, 418 aa, unidentified; identical to SEQ ID NO: 4327

SEQ ID NO: 23284 - protein, 461 aa, unidentified
MRKITETRTGKIVSDADLKLEYLYVGDYGKENNIKADFLGYTKKIEHVKHTKVDLTDKLVVTVSSQKGCPMSCNFCDCPKYGFHGNTSLSELIHQVTGGVAVVGNDKVLYQSQTELRNDIKRKMDARRLSRRSRRNRKTRYRKPRFLNRINSIKKDRLPPSVKHKVQAHIDEIEFCKKILPVSDLILEVSQFDTALMKNPGLINEKVKHWGYQKGFNYGYSSRREAILHRDNYTCQRCGKKNCRLEVHHIKFKRNGGTDNEENLITLCENCHKGIHAGTVELNKKPKKSKNLKHATHMSIIRSRLLKVYPDAIETFGFVTSENRNHLNLPKDHYIDACVIASGGLEFKELDVIYKKRRVSVQDRILTKGIRGEKRMLTGKIFGFKRFDKVKYLGETCFIKGRRSSGAFVLMNIDNNFIDFRDRGGKQNPSYMSIKRITTRKSVLCISERIEREVRLIPILS

SEQ ID NO: 23285 - protein, 402 aa, unidentified
GKAKIKKRTPFTIQLVYGSSGYTQEVILGVDAGSKTIGMSTSTKKEEVFAADVTPRNDVVDLLSTRREFRRARRNRKTRYRKPRFNNRVRSKHKGWLAPSVEVKIQEHITSIKMVCRILPVSKVVVETAEFDLQLLKAIEEGKPVPQGEDYQQGEMYGHYNVRQYVLWRDNYTCQCCGAHLTKKKEVRLHVHHLESRKVGGNAPGNLVTLCDRCHEKLHKGLITEKDLKKRKHRSTRDATFMGIMRKTLMQRLCSELPIPVAETRGYITKATREKLLVLPKSHTNDALAIAQGKHGFNVGYLPGIEQIDKIYTIRPVRHHNRQLHKATILKGGIRKSNQAEKYVFGYRLFDKAQFNGQDCFIWGRRTSGYFVVKTIDGKVIHNSASFKKLRLVERASNYLIA

SEQ ID NO: 23286 - protein, 424 aa, unidentified; identical to SEQ ID NO: 3351

SEQ ID NO: 23287 - protein, 423 aa, unidentified; identical to SEQ ID NO: 3538

SEQ ID NO: 23288 - protein, 411 aa, unidentified; identical to SEQ ID NO: 19170

SEQ ID NO: 23289 - protein, 431 aa, unidentified; identical to SEQ ID NO: 6637

SEQ ID NO: 23290 - protein, 376 aa, unidentified
PVSLGVDAGYKHVGLSASTEKAELYASEVELRQDITDLLSARRALRQSRRNRKTRYRAPRFDNRIRTKRKGWLAPSVENRINAHLSRIEAVLRLLPVTKITVETASFDMQLLKNPEISGKEYQEGEQLGFWNVREYVLFRDGHVCQHCHGRSKDPVLDVHHLESRRTGGDSPGNLITLCETCHKALHRGEITLKAKRGQSFRAEAFMGIMRWEVLNRLKASHPELEVNNTYGYRTKHARISNGIAKSHCADAFCIAGNLGAKRLGEFFFQKQTRRNNRQIHKLSILKHGLRKRNQAPFEIKGFRLFDKVACQGEEGFIFGRRSTGYFDVRKLDGTCISAGISYKKLHLLEKRRTYLTEIRKEEALPPPPEGRGLRA

SEQ ID NO: 23291 - protein, 439 aa, unidentified
MVLVIDKHKKPCNTISNAYARILLFKKQAVIHKRFPFTIRLKNDSAVLKDRNYTVKLDPGSKTTGIAITDDKDSVVMLAELEHIGHLIKKDMDSRRIVRKTRRQRKTRYRPARFLNRTKPKGWLAPSVKSRANNVINFIKKYKKFLTINKVMIEHISFDTAQMSSNTKLYGANYQQGPLYQNKLRSFVFNRSNNKCVYCGAKATEIDHVIPRSSGGTNSIYNLVASCRACNKKKSNLTLKAFGKLMNKDYSRLEPKKLPKDAAIVQSARNYMTKEITKLVSDTTLYDAWMTKYNRDQLGLPKQHYYDALSVGEIPSKFNFFADKILQISAKGRGSRQMCRMDKYGFPGTKPKGSKLVEGFQTGDMVKAVVPKGLNKGEHLGRVIIKSSGYFEIKSKNSSVQGINHKYCRLIQKGDGYLYNYKESDFLSAIAKKVMICLH

SEQ ID NO: 23292 - protein, 405 aa, unidentified
VLTRKARLLLKQQKACVVKRTPFTIKLLYGSAGYKQPITLGVDAGSKHVGLSASTEKRELYREEFTPRNDVVDLLSTRRQNRRSRRNRKTRYRAPRFDNRVHSKHKGWLAPSVEVKIQEHITVIKRICRILPITLVRVETAEFDTQRLKAMLKGKPLPVGTDYQLGEMYDEYNVRQYVLKRDNYTCQCCGAHPTEKKPVRLHVHHLESRHVGGNAPNNLITLCVACHKALHEGKITLDKGKKRGKPLRDAAFMGIMRNTLLARLKDELNIPVKQTYGYITKLLREKNKIPKSHVNDARCIAKAPNAKPCDTMLYTRALRHHNRQIHKAKILKGGIRKKNQAPYLVKGFRLWDKVRYNGEECFITGRRSSGYFALKKYDGTVISNSASYKKLMLLEAATNYITERS

SEQ ID NO: 23293 - protein, 464 aa, unidentified; identical to SEQ ID NO: 6574

SEQ ID NO: 23294 - protein, 404 aa, unidentified
LLKEKKAIVKRRTPFTIQLTIATGESKQPVTLGVDAGYKHVGLSASTEKAELYASEVELRQDVSDLLSARRALRQSRRNRKTRYRAPRFNNRLRTKRKGWLAPSVENRINAHLSRIEAVLRLLPVTKISVETASFDMQLLKNPDIAGKEYPEGEQLGFWNVREYVLFRDRHVCQHCYGRSKDPVLNVHHLESRRTGGDSPGNLITLCETCHKALHRGDITLKAKRGKSFRAEAFMGIMRWEVHNRLRALHPGIEVSNTYGYRTKHARIANGIAKSHCADAFCIAGNLGAERLCEFFFQKQTRRNHRQIHKLSILKGGIRKRNQAPFEVKGFRLFDKVACQGEEGFIFGRRSSGFFDVRKLDGTRISAGISCKKLHLLEKRRTYLTEIRKEEALPPLPEGRGLRA

SEQ ID NO: 23295 - protein, 420 aa, unidentified
MVYVLNKNNKPVMPCSERKARLLLKQGRAVIYRKDVFTIKLINGSYGYKQHITMGIDCGSKHIGISATTNKKELFSANAELRNDIVKLLSDRRMLRRSRRFRKTRYRKHRFNNRIVKNGWIAPSIKQKIQSHFNLVGFLHKLLPITNIVVETAAFDIQKINNPSIYGSEYQQGEQLDFFNVREYVLFRDNHTCQHCKGKSKDKVLNVHHIESRKTGGDSPKNLITLCETCHKAYHRGEFELNVKRGKSFRDAAFMGIMRWSFYEKLKNIYPNVSMTFGYITKYKRIKLGLDKEHYNDAYCICGNLAAKMLSTHHFIRFIPRHSRVLHMQKFSKGGVRRSASASYWLNGGKPSKIGAMFTMFDKVKFNSVVCFISGSSNGFASLRDINWNKVHGCKTTVTVNKLALVSRRRGSMLFGELCG

SEQ ID NO: 23296 - protein, 451 aa, unidentified; identical to SEQ ID NO: 9167

SEQ ID NO: 23297 - protein, 400 aa, unidentified
MPCSPAKARLLLKEKKAIVVRRTPFTIQLTIATGETKQPVSLGVDAGYEHVGLSASTEKAELYASEVELRQDVSDLLSARRALRQSRRSRNTRYRAPRFDNRIRTKRKGWLAPTVENRINAHLSRIEAILRLLPVTKITVETASFDTQLLKNPDIAGKEYQEGEQLGFWNVREYVLFRDGHICQHCRGRSKDPILNVHHLESRKTGGDAPNNLITLCETCHKAYHAGKIKLKVKRGQSFRAEAFMGIMRWTLLDRVRKTHPKLPVENTYGYLTKHKRIALGLPKTHCADAFCIAGNLKALRRGDFLFQQQTRKHNRQIHKCSILKGGVRKLNQAPFLVKGFRLFDKVRIGGQIGFVFGRRVRGTFNIRRLDKTVIGTDINCKKLSLLETRKTFLTELRKE

SEQ ID NO: 23298 - protein, 456 aa, unidentified; identical to SEQ ID NO: 3342
  REGION 1..456: note = IscB polypeptide

SEQ ID NO: 23299 - protein, 427 aa, unidentified
VFVLDTNKQALNPVHPGRARRLLSSGQAAVFKKYPFTIILKCAASSPHVWPLRVKLDPGSKTTGLAIVNDASGEVVFAASLIHRGHAIRERLEKRRAARRSRRQRKSRYRQSRFDNRGTKKKGWIAPSVQSRVCNVITWVKRLVRLCPITAISQELVKFDLQQMDHPEISGVNYQQGTLSGYEVREYLLDKWGRQCAYCGAKDVPLEVEHINPRSKSGDDRVCNLTLACEPCNTKKGTQDIRVFLAHQPELLAKLLAQAKSPLKDAAAVNITRWVLHAQLKAFGLPLECGSGGRTKFNRITRGLEKTHWCDAACVGASTPAEAEEVQARLSHRGSGESGSSSSLQACRHACWKDVSQSEWGIHDCHGRRDGHGYWQEVLPHAATSRRLWVHTERRGGVSSRPINGDGCPRHVFMVARENACHIEKNN

SEQ ID NO: 23300 - protein, 451 aa, unidentified; identical to SEQ ID NO: 3199

SEQ ID NO: 23301 - protein, 431 aa, unidentified; identical to SEQ ID NO: 5232

SEQ ID NO: 23302 - protein, 420 aa, Moorena sp.; identical to SEQ ID NO: 3094

SEQ ID NO: 23303 - protein, 460 aa, unidentified
MVAVVDLFGKPLMPTNEYRARKLLKRKKAKIFCYRPFTIQLTERKDTEIQPIELCMDTGYIHIGISAKSERHEYLGMQIDTLTDEKLKHDDKRQYRRQRRNRKRYRAPRFDNRRRKEGWIAPSLEHKKEIHIDAIQRICKVMPITDITLEMGNFDTQVLKAVEEGKPLPQGSDYQYGERYGIATLREAVFLRDGYKCQCCEKTVKDGAILHVHHIKYRSQGGTNRMSNLITVCDKCHTPQNHKPGGKLWNWKPKLAEFKGASYMTSIRWMLYNEVTALLPNRSIHITYGAKTKESRRELDIEKSHVNDAYVMGLFHPKHRTQPVYFKKKRRNNRVLERFYDAKYIDGRDGKKRSGQELFNGRISRNHKKDSENLHLYRKQKVTKGKRSIRNKHYPIQPHDILLCQKKKYETAGCHCAGTRAILLPKKKSVALKQLTMYQYAGGYYRVPYESNKKEERMSS

SEQ ID NO: 23304 - protein, 406 aa, unidentified
MVYVQDIDGRPLMPTTRHGKVRRLLKSKKATVVNLCPFTIRLLYDTTGYKQEITLGVDTGTKHVGLSATTKSKELYASEVILRSDVVDLLSTRRELRKIRRYRLRYRKPRFMNRIKSKKRGWIAPSIRQKIDSHIRIIGFVYSILPVSKLIIEVAQFDTQKIKNPEISGKEYQEGEQLGFWNVREYVLARDEHKCQHCKGKSKDPVLNVHHIESRKTGGDSPSNLITLCKTCHKEFHKGNIKLKVNRGESLRDAAVMSIMKWELYDELKSLYPNVKMTFGYITKYNRINHGIENSHVSDAFVISRNFDSERLGYYYKRKLVRRHNRQIHKMKAPKGGNKRMNQSPFKVFGFRLFDKVMFQGKERFIYARRLRGIFNIRDINGENKKDISYKKLEYVSHGLISIVAG

SEQ ID NO: 23305 - protein, 554 aa, Acidithiobacillus sp.; identical to SEQ ID NO: 7890

SEQ ID NO: 23306 - protein, 279 aa, unidentified
VVVETAEFDLHLLKAIADGKPVPQGEDYQKGEMYGHYNVRQYVLWRDNYTCQCCGAHATKKKEVRLHVHHLESRKVGGDAPDNQVTLCESCHEKLHKGLIAEKDFKKRKRRSTRDATFMGIMRKTLMQRLCSELPIPVVKTRGYITKATREKLLVLPKSHTNDALAIAQGKRGFNVGYLPEIAQIDKIYTIRPVRHHNRQLHKATILKGGIRKSNQTEKYVFGYRLFDKVQFNGQDCFIWGRRTTGIFTIKTINGKMIKDGISFKKLKLVEKSTSYLIA

SEQ ID NO: 23307 - protein, 246 aa, unidentified
KINNPNISGKEYQEGNKLGFWNVREYVLARDGHKCQYCKGKSKSKILNVHHLESRKTGGDSPSNLITLCETCHKEYHKGNIDLKIKRGSSLRDAAVMGIMKWKLYEELRSRYDRVSMTFGYITKHNRIKYGIEKSHTSDAFVISKNINAKRIGCQYLKRLIRRHNRQIHKMKILKGGKKKNNQAPFEVFGFRLFDKVLYNNKICFVYGRRKSGSFNIRDFNGENSKDVSRKKFKLIRGKRHPIILK

SEQ ID NO: 23308 - protein, 424 aa, unidentified; identical to SEQ ID NO: 3351

SEQ ID NO: 23309 - protein, 383 aa, unidentified; identical to SEQ ID NO: 8530

SEQ ID NO: 23310 - protein, 478 aa, unidentified
SGRENIGSGASNEDGDCLYLGELKTSNKSIKIKMTERTGFRRERRRHDRQSKQRKAKKDHTEIQNGNDDICRTTISCKSVQISYPAAEESVTHKIIRGKEGKFANRHRDEGWITPSARQLVQMHMNDLKSMCKILPISHVTLERVAFDFQKLENENIKTWEYGKGKLYGYDSPEEYIHDVQDGKCLVCGKPHIDYLHHIIPRSKGGSDKVSNIAGLCYDCHYGPMGVHNCQNTQDRLPELKSEANKQYKVSLLNSVMPVLIEEMDKFCKANSIMFSICEGHDTAKVRDMYDLQKDHCLDGFAISLVGRNVKSVDVMPDRIYQKQRYKKKSKNIIQKRNCREYYDGKKLVAVNRHKGTDQKADSLEEYMNTYAETHTADECKKHFDSLTVKPARRTYTFHKEWRICPFHIGDKVRYEKKNKIKGNTKVDTFICEGIRFVKDENKAEVKHNKTKSKKMKFCRVLESGCTPYVDYRKLALM

SEQ ID NO: 23311 - protein, 426 aa, Parasutterella sp.; identical to SEQ ID NO: 3045

SEQ ID NO: 23312 - protein, 489 aa, unidentified; identical to SEQ ID NO: 20025

SEQ ID NO: 23313 - protein, 457 aa, Anaerostipes sp.; identical to SEQ ID NO: 2712

SEQ ID NO: 23314 - protein, 424 aa, unidentified
MVYVLSKEGTPLMPTNRHGRVRHLLDAGEAKAVKRCPFTIQLLYQSTTYTQEITLGVDAGSKTIGLSASTEKKELYASETRLRMDITDLLSVRRQFRRTRRNRKTRYRKARFNNRVHAKHKGWLAPGIEAKIGTHFRAIRDVCRILPVTEIIVETASFNLQKIKALEKGEPVPEGTDYQKGDQLGFWNVREYVLWRDGYKCRCCNGKSKDQVLNVHHIESRKTGGDAPNNLATLCGYCHKQYHKGTILLPKSVRRGNSFRDAAFMGIMRRTFYNRLKEQYPRVAMTYGYITKNTRIRNSLPKTHYADARCIAGHPQAEPLEVYYFQKKVRCHNRQIHKSNILKGGKKKRNQAEYLVKGYRLYDRVRYQNREYYVFGRRASGFFDIRTLGGNKGNKGSVSCKKLRFLEPRKTMLIERRMQEREAV

SEQ ID NO: 23315 - protein, 466 aa, unidentified
DSLFTKGVPCMSTCVCVLSNSGERLMPTFRLGKVRRLLKDGKAKIVKHHPFTIQLLYDSKTNTQPIEICEDVGYNYIGISVKSESHEYVSAQYDTLQDEKEHHDDCRRTRRTRRNRLRYRKPRFDNRKRNKDWLAPSLEHKKQLNISLIERYVSVIPITHATVEVGSFDTMLLQAIQKGEAKPESADYQKGPRYNLATLREAVFYRDNYTCQVCKRKIADGAILHMHHMFYWKGRHGYQLDELVAACEKCHTPANHQKGGKLFGFGEDKEFANLSGAAFMNAVRWQIVNALYATYGKEFVTITYGAMTKEKRIILGIEKTHSNDAYAMGDYHPAHRCVFRHYQKRRRNNRVLEKFYDATYIDARTGNKAKGKELFNGRINRNHKKDSENFHKYRSKKVSKGRRSIRRQRYAIQPYDTVRLEGKTYITSGCHNKGTRLLIPANGKSKSVAISKVQVVCHAGAWIQII

SEQ ID NO: 23316 - protein, 416 aa, Parasutterella sp.; identical to SEQ ID NO: 10114

SEQ ID NO: 23317 - protein, 408 aa, unidentified; identical to SEQ ID NO: 18260

SEQ ID NO: 23318 - protein, 416 aa, unidentified
  REGION 1..416: note = IscB polypeptide
LSCNNPEMGLRKRVSGRKVIVPVLSITGSPLMPCTPAKARHLLERRKAKVVSLNPFAIKLTFECENKTQEVSLGIDSGYKYIGFSAVTKTKELVSGEVELDDKTSKRLTERKMYRGHRRNRLRYRKPRFNNRKTPEEWLPPSVQRRFDTHVNMIAKLKELTPVKKVTVEIGAFDIQKLMDSEISGKGYQQGDLYGYNNLKAFLFYREQGKCQFCGKKIDKGEKAHLHHIKLRSETGTDRPSNMALLHEDCHDKLHKKGLYKKLKAPKEYKAETFMSIMAARLKKALNCDVTYGYETAIKRNLLGIEKSHVNDAFVIAGGTNQERCLPCRVEQKRINNRTLQTNRKGFAPSIRKQRHKIQNRDFIWIGDKKYLCGGIASKGAMIYYFDGIEKKTIYYKEVNKFYSTGSLAWINYVSL

SEQ ID NO: 23319 - protein, 493 aa, unidentified; identical to SEQ ID NO: 3781

SEQ ID NO: 23320 - protein, 463 aa, unidentified
MPNKVYVINKHGRPLMPCSPAKARHLLDEGKAKVKKRTPFTIQLVYGSSGYTQEVILGVDAGSKSIEISASTKKEEVFAADVTPRNDVVDLLSTRREFRRARRNRKTRYRKPRFNNRVRSKHKGWLAPSVEVKIQEHITSIKMVCRILPVSKVVVETAEFDLQLLKAIEEGKPVPQGEDYQQGEMYGHYNVRQYVLWRDNYTCQCCGAHPTKKKEVRLHVHHLESRKTGGDAPGNLVTLCDSCHEKLHKGLITEDDFKKRKRRSTRDATFMGIMRKTLMQRLCSELPIPVIETRGYITKATREKLLVLPKSHTNDALAIAQGKHGFNVGYLPGIEQIDKIYTIRPVRHHNRQLHKATILKRGIRKSNQAEKYVFGYRLFDKVQFNGQDCFIWKRRTSGYFVVKTIDGKIIHNSASFKKLRIAERASKGGNGISSPPNASHWTGYPCQNNEASLFGQNDCAPAL

SEQ ID NO: 23321 - protein, 418 aa, unidentified; identical to SEQ ID NO: 9478

SEQ ID NO: 23322 - protein, 502 aa, unidentified; identical to SEQ ID NO: 16429

SEQ ID NO: 23323 - protein, 545 aa, unidentified; identical to SEQ ID NO: 6325

SEQ ID NO: 23324 - protein, 406 aa, unidentified; identical to SEQ ID NO: 6897

SEQ ID NO: 23325 - protein, 502 aa, unidentified; identical to SEQ ID NO: 2616

SEQ ID NO: 23326 - protein, 504 aa, unidentified
LAKRTTDSAVCETGASPAERAADRDPARDIRKDVWCGRRKPHPALPEKKGGMLMAVAVVSRTGVPLMPTSPYRARKLLASGKAEKYGYDPFTIRLTERETGDTQPVELCMDTGYIHIGVSVKSEKHEYLALQIDTLTDEKKKHEKCREKRRNRRSRKRYRKPRFDNRKRDKGWLAPSLEHKKEIHVQAAERICRVIPVTDITMEMGNFDTQVLKAKEEGRPLPQGTDYQQGERYGTATLREAVFSRDNYTCLCCGRTMKDGAYFHVHHIRYRSQGGTDRMANLATVCEKCHTPANHQPGGKLYNWKPEIKSFKGATFMTAVRWQMYREIKEKIPDISVHLTYGAATKERRRALDIEKSHVNDAFVMGRFHPGHRARPELYIKKRRNNRVLESFYDARYIDSRDGKRKSGKELFNGRISRNHKKDSENLHKCRLRKVSKGKRSIRKKHYPIQPHDILVYCGRKYETAGCHNLGTGAILLPERKSIAVSKLKIYRYSGGYYKAEFN

SEQ ID NO: 23327 - protein, 442 aa, unidentified; identical to SEQ ID NO: 3037

SEQ ID NO: 23328 - protein, 470 aa, unidentified; identical to SEQ ID NO: 2825

SEQ ID NO: 23329 - protein, 406 aa, unidentified
MVYVQDIDGRPLMPTTRHGKVRRLLKSKKATVVNLCPFTIRLLYDTTGYKQEITLGVDTGTKHVGLSATTKSKELYASEVILRSDVVDLLSTRRELRKIRRYRLRYRKPRFMNRIKSKKRGWIAPSIRQKIDSHIRIIGFVYSILPVSKLIIEVAQFDTQKIKNPEISGKEYQEGEQLGFWNVREYVLARDEHKCQHCKGKSKDPVLNVHHIESRKTGGDSPSNLITLCKTCHKEFHKGNIKLKVNRGESLRDAAVMSIMKWELYDELKSLYPNAKMTFGYITKYNRINHGIEKSHVSDAFVISRNFDSERLGYYYKRKLVRRHNRQIHKMKAPKGGNKRMNQSPFKVFGFRLFDKVMFQGKERFIYARRLRGIFNIRDINGENKKDISYKKLEYVSHGLISIVAG

SEQ ID NO: 23330 - protein, 427 aa, unidentified
MVFVLSSDGVPLDPCHEARARKLLKAGRAAVWKRYPFTIRLKDRLAAEAISHEHRLKIDPGSKTTGIVIVQEETARVVWAGELTHRGQQIRDALLRRRQIRCSRRQRKTRYRPVRFLNRRRRAGWLAPSLAHRALTTTTWVRRLRALCPITTISMELVRFDTQAMEHPEISGTEYQRGTLFGWDVWNYLLAKWGHRCAYCGATGVPLEQEHLIPRSRGGSDRITNLTIACRPCNERKGNQTAAEFGFPHLMAQARAPLKDAAAVNSVRWAIYQHLLATGLPVEVGTGGRTKWNRARLGYTKAHWRDAAVVGASTPDDLRVAVASVLLIAAAGHGRRQMCGTNASGFPIRHRRRQKQWFGFRSGDLVRAVIPSGKYAGRHVGRIAVRSRPSFKLNGFDVHPKYLTLVQRADGYCYFTHNLAKTGTVRN

SEQ ID NO: 23331 - protein, 451 aa, unidentified
VTTILKTCFAAFNLAKVVVLMDAWDIIVVRNKRGKPLMPCSPAKARLLLKEKKAIVVRRTPFTIQLTIATGETKQPVSLGVDAGYKHVGLSASTEKAELYASEVELRQDITDLLSARRALRQSRRNRKTRYRAPRFDNRIRTKRKGWLAPSVENRIDAHLSRIEAVLRLLPVTKITVETASFDLQLLKNPDISGKEYQEGEQLGFWNIREYVLCRDGHVCQHCYGRSKDPVLNVHHLESRRTGGDSPGNLITLCETCHKALHRGEITLKAKRGQSFRAEAFMGIMRSEVLNRLKASHPELEVNNTYGYRTKHARIANDIAKSHCADAFCIAGNLGAERLGEFFFQKQTRRNNRQIHKLSILKGGIRKRNQAPFEVKGFRLFDKVACKGEEGFIFGRRSSGFFDVRKLDGTRISAGISCKKLHLLEKRQTYLTEIRKEEALPALPEGRGLRA

SEQ ID NO: 23332 - protein, 454 aa, unidentified; identical to SEQ ID NO: 8101
  source 1..454: note = uncultured beta proteobacterium

SEQ ID NO: 23333 - protein, 436 aa, unidentified
MTKTLTKQTTQACVLDQQGKPLMPTTRLGKVYRLLKTQKAHIVSYEPFTIQLDYKPDTHIIQPMTLGVDSGAIHSGYSVANEHREYYSAEVSARDNISKRLSDRRMYRQHRRYRKTRYRKPRFNNRKNKKKGWLPPSLEQKVAVQVNEIDHLHRYFPIETIIVEVAEFDIQKIKNPDISGIEYQQGTLQGYNIRNYLLEKHRRKCFYCGKTVSKFEVEHMIPKTRGGSNRIDNLTLSCHECNQKKDTLTAEEFIKQTLPAKKAATKLKQLPNEKRLFKYMAHMNATRWTLYNAIEEKYPNVKMTYGYITKYNRIQADLPKAHHIDAKCITGFATVPSMKQTVVKIKMRRHNRQLHRATFSKGHVRKAACLPTVVFGFQLYDLVLFNNHRYYIKGRRSSGSFALVSVEGLKDEKRMYKKLTLLAHTNAYLTNQYINA

SEQ ID NO: 23334 - protein, 431 aa, unidentified
MPNKVYVINKHGRPLMPCSPAKARHLLDEGKAKIKKRTPFTIQLVYGSSGYTQEVILGVDAGSKTIGVSALTKKEELFAANVIPRNDVVDLLSTRREFRRARRNRKTRYRKPRFDNRVRSKHKEWLAPSVEVKIQEHITAIRRVCGILPVSKVVVETAEFDLQLLKAIADGKPVPQGEDYQKGEMYGHYNVRQYVLWRDDYTCQCCGAHATKKKEVRLHVHHLESRKVGGDAPDNQVTLCESCHEKLHKGLIAEKDFKKRKRRSTRDATFMGIMRKTLMQRLCSELPIPVIETRGYITKATREKLLVLPKSHTNDALAIAQGKRGFNVGYLPEIAQIDKIYTIRPVRHHNRQLHKAAILKGGIRKSNQAGKYVFGYRLFDKVQFNGQDCFIWGRRTTGIFTIKTINGKMIKDGISFKKLKPVEKSTSYLIA

SEQ ID NO: 23335 - protein, 430 aa, unidentified; identical to SEQ ID NO: 3681

SEQ ID NO: 23336 - protein, 286 aa, unidentified; identical to SEQ ID NO: 16765

SEQ ID NO: 23337 - protein, 408 aa, unidentified; identical to SEQ ID NO: 10304

SEQ ID NO: 23338 - protein, 443 aa, unidentified
LTKDENRPSGRTTGLRAEQAEPAGIRKGDTLKVFVLNIRGKPLMPCSPAKARHMLKAGKAVVVRRTPFTIKLTIATGETKQDVTLGVDAGARHVGISATTEKEEVFASEVALRQDITGLLADRLAFRRARRNRKTRYRAPRFNNRVRSKHKGWLAPSVENRIQAHISRIEAVCRLLPVTKIVIETASFDIQKIRNPEVEGTGYQQGDQLGFWNVREYVLFRDGHICQHCRGRSKDPILNVHHLESRKTGGDAPNNLITLCETCHKAYHAGKIKLKVKRGQSFRAEAFMGIMRWTLLDRVRKTHPKLPVENTYGYLTKHKRIALGLPKTHCADAFCIAGNLKALRRGDFLFQQQTRKHNRQIHKCSILKGGVRKLNQAPFLVKGFRLFDKVRIGGQIGFVFGRRVRGTFNIRRLDKTVIGTDINCKKLSLLETRKTFLTELRKE

SEQ ID NO: 23339 - protein, 451 aa, unidentified
MSVAVISNIGERLMPTSEYRARKLLKSGKAIKHSYRPFTIQLTEMETGDVQPIELCMDTGYIHIGISVKSEKHEYLAEQIDTLTNERTRHDACRMYRRQRRGRKRYRQPQFNNRKRDKGWIAPSLEHKKDIHIQAISRINKVMPLTDITMEMGNFDTQVLKAKEEGKPLPHGADYQHGERYGIATLREAVFSRDGYKCQCCGKTISDGAILHVHHIKYRSRGGTNSMTNLATVCDKCHTPKNHKPGGKLYNWKPKLPNFKGATFMTTIRWQLYSEVKSLFPDVNIHVTYGAATKEQRRELSIGKSHVNDAFVMGKFYPKHRANAVLYKKKRRNNRCLEKFYDAKYIDSRDGSKKTGQELFNGRINRNHKKDSENLHQYRLQKIKAGKRTIRKQHYSIQPHDIVIYENRKRETLGCHNNGTRVMLLPDKKSVAIKKIKIYKYTGGYFKSAFN

SEQ ID NO: 23340 - protein, 416 aa, unidentified
MVYVLDKNGQPLMPTDRHRKVRLMLQSGQAKVIKRCPFTIQLNYDSGHQTQEISLGIDAGSKHIGVSATTKIKVLYEADVELRNDIVDLLSSRRELRRGRRNRKTRYRQAKFNNRRRGNGWLAPSIRQKIGTHLTVVENICKMLPISRIMVETASFDIQKIKNPDIQGAEYQQGDQLGFWNIREYVLFRDNHTCQCCKGKSKDKILNVHHIGSRKTGGNAPNNLITLCETCHTGYHKGTVQLPKAIKRGMRFKDAAFMGIMRWAFYEALKQQYEPVGTPVHDTYGYITKHTRIAYNLPKEHYVDARCISGNPEASSNGEYYYQKKVRCHNRQIHKLTVLKGGIRKQNQATYLVKGYRLFDKVSYQGKGYFVFGRRQSGFFDIRTLSGEKVNKGSLSCKKLKFIATRTYYLTERRAV

SEQ ID NO: 23341 - protein, 480 aa, unidentified
LYTKPLDNIGEGSLPPSGEINLKGMTFMVYVKSIDGKALMPTSNAKARKLLKQKKAKVVSLRPFVVKLTYKTKTEYTQKLNLGVDSGYSNIGFSVIDAKQEYIAGEVKLLEGMKKRLLEKASYRRIRRSRLRYRKARWNNRVKSKKKGWLAPSLKHKLDTHIKFIDYLKNILPIGKITIEVANFDIQKIKDDLISGVDYQNGDMFGFWNVREFVLHRDGHKCQNPNCKHKDKKEQILKVHHIRYRSEGGSDRPENLITLCSKCHTPANHKKGKFLYDWCVNGKKVRGFKDATFMSMIRWYLVNELKSKHNNVSITYGYITKNHRIQNGIEKSHLNDAFAIAKGTNQARTKDRFLVIQDRLKNRSLEKFYDSKIIDIRTEKKVSGGDLNCGRSTRNKNLNTENLRKYRGVKISKGQRRIRKQKYFYQPNDLVKYDGKVYTVKGTQNEGKYIALKEIKKVPKVELLIPYVFKKGLNWSYGLC

SEQ ID NO: 23342 - protein, 453 aa, unidentified
RLMPTIRLGKVRHLLKDGKAKIIKHHPFTIQLLYDSETNIQPIEICEDVGYNYIGISVKSESHEYVSVQYDTLQDEKDCHDSCRKMRRIRRNRLRYRKPRFDNRKRNKDWLAPSLEHKKELNVNVIKIYCEVVPITHVTVEVGSFDTMLVKAIQEGKAIPEGADYQKGPRYNLATLREAVFYRDNYTCKVCGRKAKNDSAILHVHHMFYWKGRHGNSLNELLTVCEKCHTPANHQKGSKLYGFGENIKFANLSGAAFMNTVRWQIVNELYATFGKLFVTFTYGAMTKEKRIALHLEKCHNNDAYAMGNFHPVDRCAFEHYKKVKRNNRILEKFHDSQYIDIRTGKVANGRSLFNGRINRSHKKDSENLHKYRGKRTRKGYRALRRKKVALNPGDLVSLNGEILVVHSTHAGKNGYVGVEFKTPSKSGKKSASLKKLKIVKTSNSMHSAWTKVS

SEQ ID NO: 23343 - protein, 493 aa, unidentified; identical to SEQ ID NO: 10546

SEQ ID NO: 23344 - protein, 415 aa, unidentified
MVYVQDIDGKPMMPTTRHGKVRRLLKSNKAIVVNLCPFTIKLTYVTSDYKQEIVLGVDAGTKHVGLSATTKSKELYSSEVILRNDIVDLLSTRRELRRARRNRLRYRKPRFNNRIKSKRPGWIAPSVKYKIDAHIRVVENVCSILPISRIVIEVAQFDTQKIKNPNISGKEYQEGDQLGFWNTREYVLARDGHKCQYCKGKSKDKILNVHHIESRKTGGDSPSNLITLCETCHKEYHKGNIDLKIRRGKSLRDAAVMGIMKWRLYEEIKSKYDRVSMTFGYVTKYNRINHGFEKSHVSDAFVISKNFNAIRLGYYYKVRLVRRHNRQIHKQKIQKGGIKRLNQSPFEVFGFRLFDRVMFENSYYFIFGRRKTGSFDIRYIDGKNQKNVTYKKLKLSRCKRFMIQMELNKKNTDMF

SEQ ID NO: 23345 - protein, 424 aa, unidentified; identical to SEQ ID NO: 14112

SEQ ID NO: 23346 - protein, 423 aa, unidentified; identical to SEQ ID NO: 8242

SEQ ID NO: 23347 - protein, 430 aa, Beggiatoa sp.; identical to SEQ ID NO: 9043

SEQ ID NO: 23348 - protein, 512 aa, unidentified
MSTVYVLNKDGKTLMPTTRCGHVRHLLKKQKARVVTSNPFTIQLLYETDDVVQPLYLGIDPGRTNIGVAVVKTDGTAVFTAHLETRNKEIPKLMKKRKASRRARRTNGRRCRRQRRAKANGTISKKCVKQTTAQNGSVSKRAKEIGVIKRRLPSCEKEVLCIGIKNKEAKFNNRTRPEGWLTPTANQLLQTHVNVVKKIQKFLPISDVVLEINKFAFMQLNNPNIQKWQYQQGPLYQKADLEEAVSEMQEHHCMFCKNPIDHYHHVVPQHKNGSNTIDNIVGLCTKHHDLVHKDTAWYEKLTKKKTGLNKKYGALSVLNQIIPALTKGLSSLFQKHFFVTTGKSTYDYRAAHGVSKDHWLDAYCIACSVLPNDVCDSNINSHVPYELKQFRRHDRRALHKENINRVYTLNGKKVATNRHKAIEQTTDSLEEFRQNHPDDVCKLKVKEHHPEYRNPKRNFPGCVFLVGKRTHVMQGTSGSHNGKADGYYDTNGNSYPSGKCKFVAKNKGIVFA

SEQ ID NO: 23349 - protein, 493 aa, unidentified; identical to SEQ ID NO: 21866

SEQ ID NO: 23350 - protein, 406 aa, unidentified; identical to SEQ ID NO: 2752

SEQ ID NO: 23351 - protein, 392 aa, unidentified
EAKIVKRTPFTIQLLQATGETKQDITLGVDAGSKHIGLSATTQKKEMFSAEVELRNDIVDLLSTRRQNRRTRRNRLRYRKPRFLNRVGSKNKGWLAPSIENKIQTHISIVEKLYKLLPITKIIVEVASFDIQKIKNPDIQGTEYQQGNKLNFWNTREYVLFRDGHKCHGKKGCKNKILNVHHIESRKTGGDSQDNLITLCEECHNHYHSGKLKLNLKRGKSFRDAAFMGIMRLAFYNKLKVLYPNVSLTYGYMTKNTRIINNLPKEHRIDALCITGNPIVKRLKNYYYVKQVRKHNRQIHKANILKGGKKKLNQAPYLVKGFRLFDKVKFEDRECFIFGRRSTGYFDLRTLDGTKIHASASVKKLKLLEVRKSLLWERREQGIGVHGIPPLP

SEQ ID NO: 23352 - protein, 418 aa, unidentified
MLNNQKEYAFVLDAEGKKLDPTIVQNAWRLVRQKKAALIAKRPMTIQLKKVIDNPNDDEIRMGIDDGAKHVGLALVQKCKTKNKVIFIATMEQRNDVHKLMEQRKNYRRYRRYWKRYRKARFSNRVSVRRKGRIAPTILQKRQAVVRIFDRLNKYIRIDSIYLEDVAIDVRVLTDEKRLYSWQYQQSNRLDENLRKATILRDNCKCQLCGKRNCRLEVHHITPRRMSGANTIGNLITLCSECHSNVTGREMEFAEQLYSKIGKKKNNVSLQYASHVMVGKTWLREELSKRVPVFLTTGGDTANKRIDWNLKKSHEIDAICITNLEPESVGVKSWNIKPLRHQRKTMKVKEILGFRHRDIVYYTFKNGEYHEGYVTALYPSEGKQKEGLNFLSPTKHCKRVNPKKCQRLDRPDKFLWLV

SEQ ID NO: 23353 - protein, 402 aa, unidentified
LLFYRKEHGIMQYVYVLNKHGEPLMPCSPGKARLLLKQQKACVVRRTPFTIKLLYGSAGYKQPITLGVDAGSKHVGLSASTEKRELYSEEFTPRSDVVKLLSTRKQNRRSRRYRKTRYRAPRFDNRVHSKHKGWLAPSVEVKIQEHITVIKRICKILPISLVRVETAEFDTQRLKAMLAGKPLPVGTDYQLGEMYDEYNVRQYVLKRDHYTCQCCGAHNTAEKVVKLHVHHLESRKTGGNAPSNLVTLCTTCHKNLHKGKVTLDGKERGKPLRDAAFMGIMRKTLMARLKEELPIPVEGTYGYITKMRREQNDIKKSHTNDARCISKHPLAEPCSVCYRTKAIRHHNRQTHKANFSKKGIRKRSQMPYLVEGYRLWDKVLYKEQECFVSGRRSSGSFTLKKL

SEQ ID NO: 23354 - protein, 428 aa, unidentified
LKVFVLNMRGRPLMPCSPAKARHLLKAGKAVVRRRTPFTIQLRITTGETKQSVTLGVDAGAKHVGLSAATEKEEVFASEVELRQDITGLLAARLSLRPERRQRKTRYRAPRFLNRVRSKHKGWLAPSVENRIQAHMSRIDAICGLLPVTKIVIETASFDIQKIKHPDVEGTDYQQGDQLGFWNVREYVLFRDGHVCQHCHGHAKDKILNVHHLESRQTGGDAPNNLITLCETCHKACHAGKIKLKVKRGQSFRAEAFMGIMRWTLLDRMRKAHPGLPVENTYGYLTKNTRITLGLPKAHCVDAYCIAGNLKAVRRGVYLHQRQVRKHNRQIHKCTVLSKTLKDGTKIGYRKLNQTPHLVKNFRLFDKVRCLGQTGFIFGRRSSGYFDVRRLDGVKISSCINYRKLTLLEKRGTCLTELRKEDGASSPV

SEQ ID NO: 23355 - protein, 424 aa, unidentified
LVWNKRGKPLMPCSPAKARLLLKEKKAIVVRRTPFTIQLTIATGETKQPVSLGVDAGYKHVGLSASTEKAELYASEVELRQDVSDLLSARHALRQSRRNRKTRYRAPRFDNRIRTKRKGWLAPSVENRINAHLSRIEAVLRLLPVTKITVETASFDTQLLKNPDIAGKEYQEGEQLGFWNVREYVLFRDGHVCQHCHGRSKDPVLNVHHLESRRTGGSSPGNLITLCETCHKALHRGEIKLKAKRGHSFRAQAFMGIMRWEVLNRLKASHPELEVNNTYGYRTKHVRIRNGIAKSHCADAFCIAGNLGAERLGEFFFQKQTRRNNRQIHKLSILKGGIRKRNQAPFEVKGFRLFDKVAYKGEEGFIFGRRSSGFFDVRKLDGTCISAGISYKKLHLREKRRTYLTEIRKEEALPPLREGRGLRA

SEQ ID NO: 23356 - protein, 424 aa, unidentified; identical to SEQ ID NO: 11884

SEQ ID NO: 23357 - protein, 467 aa, Lactobacillus sp.
IRIGSPDSDKWQEPLFPALRKRRKSMKHENANRVFLLNKDGKPLMPCRPRKARLLLTSGKAFVVKKYPFTIQLKYGSYGYKQKVSLGVDTGQRHIGFAIVSQNKVLHQSEVELRQDVHKNLYTRKIYRRSKRNRKTRYRQAHFLNRVHGKRDGLWLPPSIKGKVSHNIAWIKRYLAVLPNPDLHIEVGKFDMAKMVNPEISGKQYQEGSLKDWKNYEYYVLARDEYTCQLCHKHGEGVKLVVHHIVYRSQGGTDRVDNLITLCTNCHTTKNHQPGGKLYKWMKAKKKVIKQLKGATFMNILRKRIMTAFPEASFQYGSQTYVDRKNLLLPKGHFMDAIAISGIKSVGQLSDTVTMISQFRKKKRSLHEATARKGRKQPNTSSKRNEKNTKHARGLWLNDYVRVIGNHAKGYVKGFKSNGYYVYLTDGLGNYVLNNGKNYINGQQCRLIMHNGNWQKAEQKLSLYKFK

SEQ ID NO: 23358 - protein, 199 aa, unidentified
LGKDSHSLRRGQFCQSLTVTTTRKETTSMYVYVLNQHGEPLMPCSPRKARTMLRDHKATVVRRTPFTIRLLHGCSGYTQRITLGVDAGSKFIGLSACTESKELFAAEVKPRNDVVDLLSTRRELRRSRRNRKTRYRVARFDNRVHSKHKGWLAPSVEVKIQEHITAIKKTCAILPISMVIVETAEFDTQRLKAMLEGKP

SEQ ID NO: 23359 - protein, 424 aa, unidentified; identical to SEQ ID NO: 3351

SEQ ID NO: 23360 - protein, 515 aa, unidentified
MTALEERLSKTEYIYVLGFDGKPQMPTRRKRHVLKLLKTGRARIAEDIPFTIRLTYRNAPVLQPVTLAEDPGRTNIGAAVLSPLGDLLFAAVIETRNKEIKKLMADRQKSRQASRRGERKARQRLAKRYGSMVKSGMVMRKLPMYAADRFVTCKFIRNTQARFCNRKRCPDWITPTVQHLVQTHLNIIRKISRYLPVTDIAFEVNRFAFMHMENPEAMGVDFQNGPLKGYGDVKEAIRTQQHGKCLMCKKPISHFHHIVPRSRGGSDTIQNLAGLCPECHTKVHTDTAFRKDFDEKKSGQLKKYGALSALNQAVPFICKKLLEEYGEEHVHFCRGLDTSLIRTALGFEKTKKNQMHEVDAYCIGLAALEVNEVETPAFDHTFQIRQFRRQDRSIIHHQTGRSYYQGKEKVAQNRKPGFEQKTTALSQWYEEQVRIHGEKEAEKLRSQLRVEKSCRHYNDMDRFLPGAVFLYEGKRYVLSGRITNGKYLRACGQGMKNFPAAECTFIRHNAGLVFI

SEQ ID NO: 23361 - protein, 426 aa, unidentified
MVFVLDANKKSLSPCHEAVARKLLKQGKAAIFRRYPFTIILKKVVEDTKNKQEYRLKIDYGSKHTGLAILQNNNVIWLGQIDHRTDIKKKLDERRMFRRSRRNRKIRYRKPRFLNRKRKEGWMSPSLESRINNIKTWVNRLQKLIPLTHISYENVKFDTQLMQNPEISGIEYQQGTLQGYEIREYLLEKFGRKCCYCGKENIPLEIEHIIPKSRGGTNRIDNLCLACHECNQKKGNMTAEEFGYPEVQRQVKETLKDTSVVNSTRWKVYDVLLRTSLPVECVTGALTKMNRIKLGLPKEHYFDACCVGQSTPDKLYFKTKDVLYIKAKGRGSHCRTNLDKYGFPRGYLARQKYFFGFQTGDMVKAEIPKGKYKGIWYGEVACRKSGSFDIKDKEGQRVVQGVNHKYFSVVQRFDGYSYRKEVAILT

SEQ ID NO: 23362 - protein, 433 aa, unidentified
MSTCVCVLSNSGERLMPTFRLGKVRRLLKDGKAKIVKHHPFTIQLLYDSKTNTQPIEICEDVGYNYIGISVKSESHEYVSAQYDTLQDEKEHHDDCRKMRRSRRNRLRYRKPRFDNRKRGEGWLAPSLRHKKELNVNVVKMYCAVMPITHATVEVGSFDTMLVKAIQEGKATPESADYQKGPRYKLATLREAVFYRDNYTCQVCGRKANEGAILHVHHMLYWKGRHGNSLSELITVCEKCHTPANHQKSGKLYGFGENVKFADLSGAAFMNTVRWQIVNELYAAFGKDFVTVTYGAMTKEKRIALHLEKSHNNDAYAMGEFHPNCRCTFEHYEKVRRNNRILEKFYDSRYIDIRTGEIATGKKLFNGRISRSHKKDSENLHKYRGKRTYAGHRALLRKKVNLNPGDLVSLNGKVLIVHGTHTNKKGAVNVEFK

SEQ ID NO: 23363 - protein, 442 aa, unidentified; identical to SEQ ID NO: 3234

SEQ ID NO: 23364 - protein, 414 aa, unidentified
MPCSPAKARLLLKEKKAIVKRRTPFTIQLTIAAGEAKQPVSLGIDAGYKHVGLSASTEKAELYASEVELRQDITDLLSARRALRQSRRNRKTRYRAPRFDNRISTKRKGWLAPSVENRINAHLSRIEAVLRLLPVTKITVETASFDLQLLKNPDISGKEYQEGEQLGFWNIREYVLCRDGHVCQHCYGRSKDPVLNVHHLESRRMGGDSPGNLITLCETCHKALHRGEITLKAKRGQSFRAEAFVGIMRWEVHNRLRALHPGIEVSNTYGYRTKHARIANGIAKSHCADAFCIAGNLGAERLGEFFFQKQTRRNNRQIHKLSILKGALRKRNQAPFEVKGFRLFDKVACQGEEGFIFGRRSSGFFDVRKLDGTRISAGISYKKLHLLEKRRTYLTEIRKEEALPPLPEGRGLRA

SEQ ID NO: 23365 - protein, 416 aa, unidentified
MVYILSKTGQPLMPTENHAKVRVLLKQQKAKVITNCPFTIQLLCNSTDYTQPVSLGLDAGSKHIGVSATTETKVLYEADVTLRNDIVDLLSTRREARRTRRSRKARYRKPRFNNRTRKDGWLAPSVQQKVDTHLTVVRKVLKILPISSITVETASFDIQKIKNPDIKDTNYQQGEQLGFWNVREYVLFRDGHKCQCCHGRSKDPVLNVHHIESRKTGGNAPNNLITLCETCHKGYHKGTVTLPKTIYRGMQFKDAAFMGIMRWVFYNRLKELYAAKDIPVAFTYGYITKNTRIEHGLSKEHFVDARCISGHPDAIPLKEVFYQKKVRCHNRQIHKYKILKGGIRKRNQAAYEVKGFRLYDTVLWKGQKCFIFGRRLTGRMDLRLIDGTHINASVGYKNLKLLRKRSNYLIEQRKAG

SEQ ID NO: 23366 - protein, 515 aa, unidentified
MTALEERLSKTEYIYVLSFDGKPQMPTRRKRHVLKLLKTGRARIAEDIPFTIRLAYRNAPAPQPVTLAEDPGRTNIGAAVLSPLGDLLFAAVIETRNKEIKKLMADRKKSRQASRRGERKARQRLAKRYGSMVKSGMVMRKLPMYAADKFVTCKFIRNTQARFCNRKRCPDWITPTVQHLVQTHLNIIRKISRFLPVTDIAIEVNRFAFIHMENPEAVGVDFQNGPLKGYDDVKEPIRTQQHGKCLMCKKPIGHFHHIVPRSRGGSDTIQNLAGLCPECHTKVHTDTAFRKYFDRKKSGQLKKYGALSALNQAVPFICKKLLEEYGEEHVHFCRGLDTSLIRTALGFEKTKKNQMHEVDAYCIGLAALEVNEVETPAFDHTFQIRQFRRQDRSIIHHQTGRSYYQGKEKVAQNRKPGFEQKTTALSQWYEEQVRIHGEKDAEKLRSQLRVEKSCRHYNDMDRFLPGAVFLYEGKRYVLSGRITNGKYLRACGQGMKNFPAAECTFIRHNAGLVFI

SEQ ID NO: 23367 - protein, 432 aa, unidentified
MSTSVFVLDKRHRPLMPCRPARARRLLRAGRARVVKRFPFVIRLVDRTVEQSEVQPVLIKLDPGSRETGAAVVRDDGKKRHHALAFFVIEHRGGAIRDALKARSAFRRRRRSQNLRCRSPRFLNRVKPKGWLPPSLRHRVETTLSFVRRMCRYLPVSGIATELVKFDSQKLQNPEVSGVKYQQGTLFEYEVREYLLEKFGRKCVYCGAEGVPLNIDHVVPRAKGGSNRVSNLVLACVSCNQKKGARSLEDFLKGKPEVLARVRRELKTPLRDAAAVNATRWVLFNELKATGLPVETGSGALTKLNRHAFGVEKEHWLDALCVGRLNGVVTRKGLNVLEIRCMGRGSRQRTRLTKYGFPRGYLMRQKCVHGFATGDMVEANVPKGKKAGLWRGRVAVRVSGSFNIQTPKGVIQGVGWKHCRLISHNDGYGYAW

SEQ ID NO: 23368 - protein, 300 aa, unidentified
MSTSVFVLDKKHRPLMPCRPARARRLLRAGRARVVKRFPFVIRLVDRTVEQSEVQPVLIKLDPGSRETGAAVVRDDEKKRHHALAFFVIKHRGGAIRDALKARSAFRRRRRSQNFRCRSPRFLNRVKPKGWLPPSLRHRVETTLSFVRRMCRYLPVSGIATELVKFDSQKLQNPEVSGVKYQQGTLFEYEVREYLLEKFGRKCVYCGAEGVPLNIDHVVPRAKGGSNRVSNLVLARVRRELKTPLRDAAAVNATRWVLFNELKATGLPVETGSGALTKLNRHAFGVEKEHWLDALCVGRL

SEQ ID NO: 23369 - protein, 512 aa, unidentified; identical to SEQ ID NO: 5947

SEQ ID NO: 23370 - protein, 400 aa, unidentified
  REGION 1..400: note = IscB polypeptide
MPCGTIKARKLLKQGKAKVFKRTPFTIQLLFATGETKQEIILGVDAGSKTIGLSATTDKQEVFSAEVELRNDIVDLLSTRRQNRRTRRNRLRYRQPRFLNRVGSKNKGWLAPSIENKIQTHLKIIEKLHKILPVTKIIVETASFDIHKIKNPEISGQEYQQGEQLSFWNVREYVLFRDGHQCQGEKGCKCKILNVHHIESRKTGGDSPNNLITLCEECHQAFHEGKLKLNLKRGKSFKDAAFMGIMRWAFYNKLKELYPQVQLTYGYITKNTRITNQLPKEHRIDALCITDNPTVKRLDTWYFIKQVRKHNRQIHKANILKGGNKKLNQSPYLVKGFRLFDKVEFDGKECFVFGRRSSGYFDLRTLEGTKVHASASVKKLKLLETRKTLLWERRKQGFGV

SEQ ID NO: 23371 - protein, 280 aa, unidentified
VKYKIDAHIRVVENVCSILPISRIVIEVAQFDTQKIKNPNISGKEYQEGDQLGFWNTREYVLARDGHKCQYCKGKSKDAILNVHHIESRKTGGDSPSNLITLCETCHKEYHKGNIDLKIKRGSSLRDAAVMGIMKWKLYEELRSRYDRVFMTFGYITKHNRIKYGIEKSHTSDAFVISMNINAKRIERQYLKRLIRRHNRQMHKMKILKGGKKKNNQAPFEVFGFRLFDKVLYNNKIFFVYGRRKSGSFNIRDFNGENSKDVSRKKFKLIRGKRHPIILK

SEQ ID NO: 23372 - protein, 361 aa, unidentified; identical to SEQ ID NO: 7533

SEQ ID NO: 23373 - protein, 420 aa, unidentified
MFVYVLDKNGQPLMPTERFGKVRRLLRDGKAKVVQRCPFTIRLLYEPETKIVQEIVLGVDTGSKHVGVACVGNDKVLYQAQIELRDDIKKKMDSRRVYRRNRRFRKTRYRKCRFLNRRNSIKKDRLPPSVKHKVQAHIDEIEFCKKILPISDENIILEVSQFDTALMKTPNLIHEKIRHWGYQQGFNYGHSSRRKAVLHRDNYTCQCCGKKNCQLQTHHIIFRSCGGSDDENNMITLCKECHKGVHDGTIVLNKKPKAKRLKHTTHMSIIRSRLLKEYPNAIETFGFVTSENRNHLKLKKDHYIDACVIASGGLRFEQSDTLYRKRRVSVQDRILTKGVRDEIKLPTGKVNGFKRYDKAQYFGEVCFIKGRRTKGDVVLMDIENTVLDFRGVGGCKNPSYKKLQRVNARKSVLCVLGWGI

SEQ ID NO: 23374 - protein, 428 aa, unidentified
MLVYVLKQNGQPFMPTARFGKIRRLLKAKKVKVVRREPFTIKLLYEPETDVVQECYCGVDTGSRHIGVAVVGNDKVLYQSQTELRNDIKRKMDARRAYRRNRRSRKTRYRKPRFLNRGNSTKSNRLPPSVKHKVQAHIDEIEFCKKILPVSDLIVEVSQFDTALMKDPRLISEKIKHWGYQQGFNYGYSSRREAILHRDNYTCQCCGKKNCRLEVHHIKFKNNGGTDDEENLITLCEDCHKGVHTGTVVLSKKPKKSKNLKYATHMSIIRSRLLKKYPNAIETFGFVTAENRNHLNLEKNHYIDACVIASGGLEFKELEVIFYKNRVSKGDYQLTKGIRGEQKLPTGKICGFRKFDKVEYLGEKCFIKGRMSSGFAILMNIFSEKVDFSSMPKGLKTPKLSNCNRISARSSCLCISQIRKERAIHVLS

SEQ ID NO: 23375 - protein, 388 aa, unidentified
VVKRTPFTIKLLHESAGYKQPITLGVDAGSKHVGLSASTETHELYCEEFTPRNDVVELLSTRRQNRRSRRYRKTRYRAPRFNNRVHSKHKGWLAPSVEVKIQEHITVIKRICRILPITLVRVETAEFDTQRLKAMLAGKPLPVGTDYQLGEMYDEYNVRQYVLKRDNYTCQCCGAHTTAKKAIKLHVHHLESRKVGGNAPSNLITLCTACHDNLHKGKVTLDGKKRGKTLRDAAFMGIMRNTLLIRLRNELNIPVQNTYGYITKLLREQNDIKKSHINDARCISKHPLAEPCSVCYRTKAIRHHNRQIHKAKILKGGIRKANQAPYIVKGFRLWDKVLYNGQECFISGRRSSGYFALKKLDGTAITNSISFRKLRLLEPAINYLIERM

SEQ ID NO: 23376 - protein, 426 aa, unidentified; identical to SEQ ID NO: 3177

SEQ ID NO: 23377 - protein, 416 aa, unidentified; identical to SEQ ID NO: 4039

SEQ ID NO: 23378 - protein, 371 aa, unidentified; identical to SEQ ID NO: 17842

SEQ ID NO: 23379 - protein, 431 aa, Moorena sp.
MRVFVLNKNRQPLDPCKPARARILLSSGKAKVYRRYPFTIILTEEIKEPITREHQLKIDPGAKTSGLAIVQGKRVIWGAELTHRGFQIRDALTSRRQLRRSRRNRKTRYRKPRFLNRTRPKGWLAPSLMSRAQNILTWVKKLTRLCPVTGISQELVRFDTQKLQNHEISGIEYQHGTLYGYELREYLLEKWNRKCAYCGAVDTQLEIEHIKPKSKGGSDRVSNLAIGRRPRYANACHPCNQAKSNQDIELFLSKNPSLLKRILNQAKRPLADAASVNTTRWKLYHELKSIGLPLEVGSGGLTKFNRCRQNLPKTHWLDAANVGKVETLIIEVTHPLIITAKGHGTRQLCRTNKYGFPTRHCSRIKFHKGFQTGDIVRAVVTKGKKIGTYVGRVATRKSGSFNISTKSGLVQGVSHKYCQFIHRKDGYAYTN

SEQ ID NO: 23380 - protein, 470 aa, unidentified
MSVFVVGLNGCRLMPTSERKARLLLKQGKAFVEQKVPFTIRLNYKTGSTTQLGYLGIDTGSQHIGVSVVREDGTVLHKEEIGLRDSMSKRKLLEAKASLRRGRRYRKTRYRHPKWRPKTKRVYCEVPDRKGRHWQKKKITFTSKRPKGWLPPSLQSKTDHHIRWIKKLQDLLPEGYRLSIELGRFDPARMKNLEIHGDLYQKGPQYDYENVRAYVLDRDRYTCQICKKKGGKLHVHHILYRSHGATDDPQYMVTVCSDCHSAQNHLPGGILYQWMQEQKRFSRGLRDATFMNILRKRLIRAFPEAVFTYGNVTKVDREKLKLPKSHGNDATAIALVKTGITAVKDKESVICIQQVRRKKRSLHEETPRKGRKEPNRTAARNNKNTKAVTVTKRQNKKKVSMTGCLFDRVELNGKKGWISGFTGKSCYVKDADDQYLSTSPKYKQVSLSKLRILHHCGNWIIGAKKTLGKG

SEQ ID NO: 23381 - protein, 387 aa, unidentified
MVYVLNNQGQPLMPTERHGKVVQEVSLGIDAGSKHFGVSATTEQRELLAMQVEERDDVVKLIADRREARRTRRNRKTRYRAARFDNRRRKEGWFAPSSENRISAHLRVIKFVCSILPVGKTTIEVAQFDSQKIKDDKITGVEYQQGEQLGFWNVREYVLARDGHTCQYCKGKSKDKILNVHHLESRKTGGNAPNNLITLCETCHKAYHRGDIQLKARRGTSLRDAAAMSIMRWEVYNRAKQEFTNVHLTYGYMTKHSRIHNDIAKTHCADAFCITGNVDARRLTWFLGVRMQRRHNRSLHLYKPAKGGIRRPNIASHWIGKSRLQQYDYVEWNGQKAFVSGSQNGRPYLKNFEDKYIMTPKASVNAKTVKFIRRKRGSMIIEQLPKM

SEQ ID NO: 23382 - protein, 455 aa, unidentified; identical to SEQ ID NO: 10285

SEQ ID NO: 23383 - protein, 459 aa, unidentified
  source 1..459: note = Firmicutes bacterium
MQKLRERRLTNTPTVIPHDRSNCGLSLNSPEGRDSVTGLKTSPNSPDAALTAGGHAGQNLRVSVVYPHTKSFGVGVYVLNRRGKPLMPCSPRKARALLREDKARVVKRTPFTIQLTMTTGETKQSITLGVDSGYSRIGLSAVTNKQEVYSAGVNLRTDMVKLNSERRQYRRFRRSRKTWYRKPRFLNRKKPKGWLAPSIQNKFDTQIKLIGKAGEILPISQINIEVAAFDIQKIKNPDISGIEYQKGEQKGFWNVREYALHRDNHTCQHCKGKSKDPVLEVHHIVSRQIGGMRPDNLITLCSTCHEKVSKAGLKLNIQFSKEFKAETFMSTVRWMLVNKLKGLGNVVFHTYGYITKQKRRELRLPKSHSNDAFLIAGGTIQDRVGVEYLIQQVRKCNRKLFKGERSHIKNTSERIINGFERFDKVLWRRIECFIIGRRKTGYFDIRKLDGTKIHASALR

SEQ ID NO: 23384 - protein, 443 aa, Fervidicola sp.; identical to SEQ ID NO: 12449

SEQ ID NO: 23385 - protein, 423 aa, Moorena sp.
MRVFVLNKNRQPLDPCKPARARILLSNGKAKVYRRYPFTIILTEEIEEPITHNHQLKIDPGSKTSGLAIIQNNRVVWGCELTHRGFQIRDALTSRRQLRRARRHRKTRYRQPRFLNRTRPKGWLAPSLMSRVHNILTWVKKLTRLCPITGLSQELVRFDTQKLQNPEISGIEYQQGTLYGYELREYLLEKWNRKCAYCGAKGNHLEIEHIKPLSKGGSNRVSNLVIACHSCNQTKSNQEIEQLLSGKPEILKIILSQAKRPLADAAAVNTTRWKLYHELKLFGLPVEVGSGGLTKFNRCRQNLPKTHWLDAANVGKVDTLIVEDYKPLLVAAKGHGTRQICRTNKYGFPIRYCSRVKINKGFQTGDIVRAVVTKGKKIGTYVGRVATRKSGYFNISTKSGLVQGISHKYCQFIHRKDGYAYTD

SEQ ID NO: 23386 - protein, 426 aa, unidentified; identical to SEQ ID NO: 3614

SEQ ID NO: 23387 - protein, 524 aa, unidentified; identical to SEQ ID NO: 9992

SEQ ID NO: 23388 - protein, 469 aa, unidentified; identical to SEQ ID NO: 9316

SEQ ID NO: 23389 - protein, 430 aa, unidentified
MAVFVLDKHKKPLMPCTEKRARLLLERRRAVVHKMSPFTIRLKDRTVEQSQLQPLRLKLDPGSKITGLAVLRENDSENRAAILLAELCHKPGIKEKLDVRKTQRRNRRNRKTRYREKRFDNRTRPSGWLPPSLQARVNQASNVVAKLQKLLPITAISTEHAKFDTQLLQNPAIAGIEYQQGELLGYEVREYLLEKWKRECAYCGKTDIPLEIEHITPKSRGGSDRISNLAIACRPCNQAKGNRTAEEFGHPEIQKQAKLPLKDAAMMNATRWALFNRLKETGLPVEYGTGARTKKQRIEHKFPKTHYYDACCVGAGTPANLAIGQKYVSIWKAIGRGTRRMCNIDKYGFPICHRQRKKNHFGFQTGDITAAAIPRGKYQGIHTGRVAVRASGYFDLKDVSGIRICQGIGHKHFRLLQRAGGWHYGKAKIA

SEQ ID NO: 23390 - protein, 424 aa, unidentified; identical to SEQ ID NO: 3434

SEQ ID NO: 23391 - protein, 413 aa, unidentified; identical to SEQ ID NO: 6473

SEQ ID NO: 23392 - protein, 473 aa, Marinobacter sp.; identical to SEQ ID NO: 19173

SEQ ID NO: 23393 - protein, 313 aa, unidentified
LYSQSKIAQSAQEYGVCRGGIENRRSRRNRKTRYRPPRFDNRVHSKHKGWLAPSVEVKIQEHITVIKRICRILPITLVRVETAEFDTQRLKAMLEGKPLPVGTDYQLGEMYDEYNVRQYVLKRDNYTCQCCGAHTTAKKAVKLHVHHLESRKMGGNAPGNLITLCITCHDALHKGKVSLDNKKRGKPMRDAAFMGIMRRTLMSRLREELPITVQGTYGYITKMQREQNDIKKSHVNDARCISKHPLAEPCSVCYRTKAIRHHNRQTHKANFSKGGIRKRSQMPYVVEGYRLWDKVLYKGQECFVSGRRTSGSF

SEQ ID NO: 23394 - protein, 438 aa, unidentified
LKDGKAKIIKHHPFTIQLLYDSKANTQPIEICEDVGYNYIGISVKSQSHEYVSAQYDTLQDEKACHDSCRKLRRTRRNRLRYRKPRFDNRKRGEGWLAPSLEHKKQLNIRLIERYVSVIPITHATVEVGSFDTMLVKAIEEGKATPESADYQKGPRYNLATLREAVFYRDNYICKVCGRKATEGAILHMHHMFYWKGRHGNSLSELITVCEKCHTPANHQKSGKLYGFGENVKFADLSGAAFMNTVRWQIVNELYAAFGKDFVTVTYGAMTKEKRIALHLEKSHNNDAYAMGSFHPVNRCAFEHYEKVKRNNRILEKFYDSQYIDTRTGELTNGKSLFNGRISRGHKKDSENLHKYRGKRICKGHRALRRKKLALNPGDLVSLNGEILVVHGTHTKKNGSVNVEFKTPSRGGKKSASLKKLKIVKTSNLMHSAWTKVS

SEQ ID NO: 23395 - protein, 441 aa, unidentified
MSVSVFVQDRKHRPLMPCRPARARRLLKSGRARVVRLFPFTIRLTDRLIEDSKLQPVLVKIDPGSRQTGVALVRADEKAHHHALFFVNLVHRGESIRDALTARRNCRRRRRGNLRHRAPRFLNRTKPQGWLPPSLRHRVDTATAWVAKLVKLAPVTGIVEELVKFDAQKLQNPEISGTEYQQGTLFEYEVREYLLEKFGRKCVYCGAENVPLNIDHVVPKARGGSNRISNLVLSCVNCNQKKDSQPVEVFLKNRPEVLDRIKRRLKTSLAHAATVNATRWSLFNALKAFGLPVETGSGALTKFNRHTFGVPKEHWLDALCAGRVNGVHYPEGMGILQVRCTGRGSYQRTRVDKYGFPRGYLTRQKRVHGFATGDMVEVVVPSGKKAGTYRGRVAVRKSGYFNIQTPEGVIQGIGWRHCRLLSFNDGYGYAWLRPAPHSSPV

SEQ ID NO: 23396 - protein, 442 aa, unidentified; identical to SEQ ID NO: 4522

SEQ ID NO: 23397 - protein, 427 aa, Enterococcus sp.; identical to SEQ ID NO: 5630

SEQ ID NO: 23398 - protein, 411 aa, unidentified; identical to SEQ ID NO: 5226

SEQ ID NO: 23399 - protein, 430 aa, Oscillochloris sp.; identical to SEQ ID NO: 12556

SEQ ID NO: 23400 - protein, 424 aa, unidentified; identical to SEQ ID NO: 3351

SEQ ID NO: 23401 - protein, 284 aa, unidentified
QYQQGPLYQKGSLENAVSEMQEHHCLFCEKPIEHYHHVVPKSENGSNTIANIVGLCTEHHNLVHKDATWQKKLAKEKVGLVKKYSALSVLNQIIPALTKEMNSLFPKHFFVTNGKSTYDYRTAHGVSKDHWLDAYCIACSVLPNDVCDSNINSHVPYELKQFRRHDRRVLHKANMSRVYTLNGKTVATNRHKAIKQTTDSLEEFRQSHPGDVCKLKVKEHHPAYRNLNRNYPGSVFLVDGQVHVMQGVSGSHNGKADGYYNTNGNAYPYYKCKFVVKNEGIVFA

SEQ ID NO: 23402 - protein, 442 aa, Lactobacillus sp.; identical to SEQ ID NO: 4549

SEQ ID NO: 23403 - protein, 420 aa, unidentified
MQYVYVLNKHGEPLMPCSPGKARLLLKQQKAHVIKRTPFTIKLLYGSAGYKQPITLGVDAGSKHVGLSASTEKRELYREEFTPRNDVVKLLSKRKQYRRSRRNRKTRYRAPRFNNRVHSKHKGWLAPSVEVKIQEHITVIKRICRILPISLVRVETAEFDTQRLKAMLEGKSLPVGTDYQLGEMYDEYNVRQYVLKRDNYTCQCCGAHTTKKKTVKLHVHHLESRQVGGNAPNNLITLCVDCHKALHAGKVKLDGKKRGKSLKDAAFMGIMRKTLMARLSKELPIPVQGTYGYITKMLREQNDIKKSHVNDARCISKHPLAEPCSVCYRTKAIRHHNRQTHKANFSKKGIRERSQTPYVVEGYRLWDKVLYKGQECFISGRRTSGSFALKRLDGTSISESVTFKKLRLLEPATNYLIERM

SEQ ID NO: 23404 - protein, 443 aa, unidentified
LTKDENRPSGRTTGLRAEQAEPAGIRKGDTLKVFVLNMRGKPLMPCSPAKARHMLKAGKAVVVRRTPFTIKLTIATGETKQDVTLGVDAGARHVGISATTEKEEVFASEVALRQDITGLLADRLAFRRARRNRKTRYRAPRFNNRVRSKHKGWLAPSVENRIQAHISRIEAVCRLLPVTKIVIETASFDIQKIRNPEVEGTGYQQGDQLGFWNVREYVLFRDGHICQHCRGRSKDPILNVHHLESRKTGGDAPNNLITLCETCHKAYHAGKIKLKVKRGQSFRAEAFMGIMRWTLLDRVRKTHPKLPVENTYGYLTKHKRIALGLPKTHCADAFCIAGNLKALRRGDFLFQQQTRKHNRQIHKCSILKGGVRTLNQAPFLVKGFRLFDKVRIGGQIGFVFGRRVRGTFNIRRLDKTVIGTDINCKKLSLLETRKTFLTELRKE

SEQ ID NO: 23405 - protein, 458 aa, Lactobacillus sp.; identical to SEQ ID NO: 6016

SEQ ID NO: 23406 - protein, 462 aa, unidentified; identical to SEQ ID NO: 2823

SEQ ID NO: 23407 - protein, 423 aa, unidentified; identical to SEQ ID NO: 4062

SEQ ID NO: 23408 - protein, 423 aa, unidentified; identical to SEQ ID NO: 3951

SEQ ID NO: 23409 - protein, 415 aa, unidentified; identical to SEQ ID NO: 10543

SEQ ID NO: 23410 - protein, 325 aa, unidentified
RKTRYRAPRFDNRIRTKRKGWLAPSVENRINAHLSRIETVIRLLPVTKISVETTSFDMQLLKNSDIAGKEYQESEQLGFWNVREYVLFRDGHVCQHCHGRSKDPVLNVHHLESRRTGGDSPGNLITLCETCHKELHRGEITLKAKRGQSFRAETFMGIMRWEVLDRLKASHPKLEVQNTYGYRTKHARIVNGIAKSHCADAFCIAGNLGAERLGEFLFQKQTRRNNRQIHKLSIPKGGIRKRNQVPFEVKGFRLFDKVACKGEEGFVFGRRSSGYFDVRKLDGTRISAGISYKKLHLLEKRQTYLTEIRKEEALPPLPEGRGLRA

SEQ ID NO: 23411 - protein, 470 aa, unidentified; identical to SEQ ID NO: 9228

SEQ ID NO: 23412 - protein, 411 aa, unidentified; identical to SEQ ID NO: 4865

SEQ ID NO: 23413 - protein, 416 aa, unidentified; identical to SEQ ID NO: 4565

SEQ ID NO: 23414 - protein, 518 aa, unidentified
MTPKKRKEASRMSEYIYVLGMDGDPQMPTKRKRHVEKLLQAGRARVFRQIPFTIQLTYENKPVLQPVTIAEDPGRSNIGMAVVSLSGELLSAAVVQTRNKEIVKLMEKRKQHRRASRNGERKARQRLAKKCHTMIKAGSLMRKLPMYGKDKRVRCNMIKNTEARFCNRKREDGWLTPSAEHLVRTHINLIHKMQKFLPITDVAIEINRFAFLSLEDPSISGVDFQNGPLKGYDDLNAAVEDLQDGHCLMCNSQIEHRHHIVPRSMQGSNTIGNIAGLCCKCHERVHKDSAFEDSLKKKKAGLNKRYAAVSALNQAIPFICKRLEQEFGKEHVHYCSGRDTSMVRRSLGYHKTKEEQLHEVDAWCIAVLSLQQIPEKAPSFDHVHEILQFRRQDRSRIKAQTSRAYYHERKKIAKNRKKAEGQKDDSLQGWRKRQVERYGEEQTRKMISQLKVKKSIRRYNRLDRLMPGAVFYYQGVRYVMRGQHSNGQYLQAVGMRDKDFPAKKCKIVVHNQGLVFVS

SEQ ID NO: 23415 - protein, 465 aa, unidentified
MSTCACVLSKNGERLMPTIRLGKVRHLLKDGKAKIIKHHPFTVQLLYDSETNIQPIEICEDVGYNYIGISVKSQSHEYVSAQYDTLQDEKSCHDACRRMRRTRRNRLRYRQKRFDNRKRDKGWLAPSLKHKKELNVNVIKMYCEVVPITHATVEVGSFDTMLVKAIEEGKATPEGADYQKGPRYNLATLREAVFYRDNYTCQVCGREASEGAILHVHHMFYWKGRHDNSLSELITVCEKCHTPANHQKGGKLYGFGEDIKFANLSGAAFMNTVRWQIVNELYAAFGKPFVTFTYGAMTKEKRIALHLEKSHNNDAYAMGEFHPNCRCTFEHYEKVRRNNRILEKFYDSRYIDIRTGEIATGKELFNGRINRSHKKDSENLHKYRGKRIRKGYRALRRKKVALNPGDLVSLNGEILTVHGTHTKKNGSVNVEFKTPSKSGKKSTSLKKLKIIKTISPMRSAWDKVS

SEQ ID NO: 23416 - protein, 451 aa, unidentified; identical to SEQ ID NO: 5203

SEQ ID NO: 23417 - protein, 395 aa, unidentified; identical to SEQ ID NO: 14042

SEQ ID NO: 23418 - protein, 493 aa, unidentified; identical to SEQ ID NO: 2644

SEQ ID NO: 23419 - protein, 306 aa, unidentified
LAPSVEVKIQEHITAIRRVCGILPVSKVVVETAEFDLQLLKAIADGKPVPQGEDYQQGEMYGHYNVRQYVLWRDGYTCQCCGAHTTKKKEVRLHVHHLESRKVGGDAPDNQVTLCESCHEKLHKGLIAEKDFKKRKRKSTRDATFMGIMRKTLMQRLCSELPIPVIETRGYITKATREKLLVLPKSHTNDALAIAQGKQGFNVGYLPEIAQIDKIYTIRPVRHHNRQLYKATILKGGIRKSNQTKKYVFGYRLFDKVQFNGQDCFIFGRRTSGYFVVKTIDGKVIHNSASFKKLKLVERASNYLIA

SEQ ID NO: 23420 - protein, 428 aa, Thioploca sp.; identical to SEQ ID NO: 16155

SEQ ID NO: 23421 - protein, 430 aa, Citrobacter sp.; identical to SEQ ID NO: 5184

SEQ ID NO: 23422 - protein, 423 aa, unidentified
MSNYTFVLDTNKKPLEPIHPGEARLLLKQGKAAVFRLYPFTIILKEKVPEIPETLSLKIDPGSKTTGIALLQNNKVIFCAELTHRGQAIKASLESRRALRRSRRSRHTRYRQPRFLNRTKPKGWLAPGLQHRVETTLTWVKKLIRLAPISSISQELVKFDLQKMENPEIVGVEYQQGELLGYEVREYLLNKWDRKCSYCGVKNIPLQVEHIHPKAKGGTNRISNLCLACEKCNQQKGTQLIEQFLAKKPEVLKRVLAQAKKPLKDAAAVNATRWGLFNQLKATGLPINKGSGGLTKFNRARLNLPKSHWIDAACVGKIDELKLLTNKPLLIKATGHGTRQMCRTDKFGFPSRYVPRFKFVKGFQTGDVVKAAVTSGKKIGNYAGRVAVRSSGSFNISASELVQGISHKYCQIIHKKDGYSYGF

SEQ ID NO: 23423 - protein, 536 aa, unidentified; identical to SEQ ID NO: 4526

SEQ ID NO: 23424 - protein, 453 aa, unidentified
MSVAVVSKTGMLLMPTSEYRARKLLKSKKAIIHGYHPFTIQLTERETGYIQPVELCMDTGYIHIGTSVKSEKHEYLGEQIDTLTDERQKHDACRMYRRQRRNRKRYRQPRFNNRERDDGWIAPSLEHKKTIHIQAISRICKVIPVTDITLEMGNFDTQVLKAREEGRPLPQGLDYQHGERYSVTTLREAVFLRDGYTCQCCGRTIKDGAILHAHHVIYRSQGGTNRISNLITVCDKCHTPANHKPGGKLYGWKPKVASFKGATYMTTIRWKLYNEVKALFLDIDIHITYGAETKERRRAFDITKSHVNDAFVMGQFHPKYRSKPVCYKKKRRNNRCLEKFYDAKYIDNRNGKTRTGQELFNGRISRNHKKDSENLHQYRRQKISTGKRTIRKQHYAIQPHDIVIFNGEKFETSGCHNNGTRVILLPQKKSVAIKKLNIYRYAGGYFKSAFNQK

SEQ ID NO: 23425 - protein, 252 aa, unidentified
MVYVQDIDGKPMMPTTRHGKVRRLLKANKATVVNLCPFTIRLTYATSGYKQEIVLGVDAGTKHVGLSATTKSKELYSSEVILRSDIVELLSTRRELRRTRRNRLRYRKPRFGNRVKSKHHGWVTPSVRHKVDAHIRVIDNICSTLPISRIIVEIAQFDTQKIKNPDISGNEYQEGDQLGFWNVREYVLARDGHKCQHCKGKSKDPILNVHHIESRKTGGDSPSNLITLCETCHKEYHKGNIDLKVKRGKSLR

SEQ ID NO: 23426 - protein, 458 aa, Lactobacillus sp.; identical to SEQ ID NO: 6016

SEQ ID NO: 23427 - protein, 477 aa, unidentified
MWLNSSEGKEQCCIRVNLGITLGKDSHSLRRGQFCQSLTVTTTRKETTSMYVYVLSQHGEPLMPCSPRKARTMLRDHKATVVRRTPFTIRLLHRSSEYKQDITLGVDAGSKFIGLSACTESKELFAAEVKPRNDVVDQLSTRRELRRSRRSRKTRYRAARFNNRVHSKHKGWLAPSVEVKIQEHITAIKRTCAILPIFMVIVETAEFDTQRLKAMLEGKPLPVGTDYQLGEMYDEYNVRQYVLKRDTYTCQCCGIQSTDKAPVKFAVHHKESRHVGGNAPNNLITLCEKCHRLLHAGVITLDEDKRKRGKSFRDAAFMGIMRKTLIQRLRSELSVPAKETYGYITKLLRDTHAIQKSHVNDARCIARVPDAQPSDTLYRIRAVRHHNRQLHKANPIKGSIRKRNQTPYEVFGFRLWDKVLFNGKECFITGRRVSGYFALKDFDGKKVHASASHKVLTKVESATSYLIERRTAVSSRV

SEQ ID NO: 23428 - protein, 456 aa, unidentified
MSTCVCVLSNSGERLMPTFRLGKVRHLLKDGKAKIVKHHPFTIQLLYDSKTNTQPIEICEDVGYNYIGISVKSQSHEYVSAQYDTLQDEKACHDSCRKLRRSRRNRLRYRKPRFDNRKRGEGWLAPSLRHKKELNVNVVKMYCAVMPITHATVEVGSFDTMLVKAIQEGKAIPEGADYQKGPRYNLATLREAVFYRDNYVCKVCGRKATEGAILHVHHMFYWKGRHGNSLSELITVCEKCHTPANHQKGGKLYGFGENVKFADLSGAAFMNTVRWQIVNELYAAFGKDFVTVTYGAMTKEKRIALHLEKSHNNDAYAMGNCHPAHRCEFGHYQKRCRNNRVLEKFYDATYIDTRTGDKAKGKELFNGRISRNHKKDSEDLHKYRSKKVSKGRRSIRRQRYAIQPYDTVRLESKSYITSGCHNKGTRLLIPANGKSKSVAISKVQVVCHAGAWIQII

SEQ ID NO: 23429 - protein, 422 aa, unidentified
LNKRGKPLMPCSPAKARLLLKEKKAIVVRRTPFTIQLTIATGESKQPVSLGVDAGYKHVGLSASTEKAELYASEVELRKDITDLLSARRALRQSRRNRKTRYRAPRFDNRIRTKRKGWLAPSVENRINAHLSRIEAVLRLLPVTKITVETASFDMLLLKNPDIAGKEYQEGEQLGFWNVREYVLFRDGHVCQHCYGRSKDPVLNVHHLESRRTGGDSPGNLITLCETCHEALHRGEIALKTKRGHSFRAEAFMGMMRWEVLNRLKASHSELEVNNTYGYRTKHARIVNGIDKSHCADAFCIAGNLGAERLCEFFFQKQTRRNNRQIHKLSILKGGIRKRNQAPFEIKGFRLFDKVACKGEESFIFGRRSSGYFDVRKLDGTRISAGISYKKLRLLEKRRTYLTEIRKEEALPPLPEGRGLRA

SEQ ID NO: 23430 - protein, 544 aa, unidentified
MKQKKQKVIVYILNKKGKPLMPTTRCGHVRKLLDSKKAVVVNSNPFTIRLKYDTPNGVQDVFAGIDSGRENIGSGVSNEDGDCLYLGELRTSNKSIKMKMNERAGFRRERRKHDRQNKQRKARKDHTEIQNGKADICRATISCKSVQISYPTAEESVTHKIIRGKEGKFANRHRDGDWITPSARQLVQIHMNDLKSICKILPISHVTLERVAFDFQKLENENIKAWEYGKGKLYGYDSPEEYIHDVQDGKCLVCGKPHIDYLHHIIPRNKGGSDKVSNIAGLCYDCHYGPMGVHNCQDTQDRLPELKNEANKQYKVSLLNSVMPVLIEEIDKFCKANSIMFSICEGHDTAKVRDMYDLQKDHCLDGFAISLVGRNVKSVDVMPDRIHQKQRYKKKSKNIIQKRNCREYYDGKKLVAINRHKGTDQKADSLEEYMNTYAETHTADECKMHFESLTVKPARRIYTFHKEGRICPLHIGDKVRYEKKNKIKGNTKVDTFICEGIYFSKDENKAKVEHNKTKSKKMKFCRAIESGCIPYIDYIKFALI

SEQ ID NO: 23431 - protein, 457 aa, unidentified
VWLYQAVYNLGEGFLPSSEERTAFYWLLIYRKEHGIMQYVYVLNKHGEPLMPCSPGKARLLLKQQKACVVKRTPFTIKLLYGSAGYKQPITLGVDAGSKHVGLSASTEKRELYREEFTPRNDVVDLLSTRRQNRRSRRNRKTRYRAPRFDNRVHSKHKGWLAPSVEVKIQEHITVIKRICRILPITLVRVETAEFDTQRLKAMLKGKPLPVGTDYQLGEMYDEYNVRQYVLKRDNYTCQCYGAHPTEKKPVRLHVHHLESRHVGGNAPNNLITLCVACHKALHEGKITLDKGKKRGKPLRDAAFMGIMRNTLLARLKDELNIPVKQTYGYITKLLREKNKIPKSHVNDARCIAKAPNAKPCDTMLYTRALRHHNRQIHKAKILNGGIRKKNQAPYLVKGFRLWDKVRYNGEECFITGRRSSGYFALKKYDGTVISNSASYKKLMLLEAATNYITERS

SEQ ID NO: 23432 - protein, 492 aa, unidentified; identical to SEQ ID NO: 4486

SEQ ID NO: 23433 - protein, 438 aa, Ktedonobacter sp.
MNQVFVLDTTKQPLNPVHPGYARLLLKQGKAAVYRRYPFTIRLSRRVEQPILSPLRIKVDPGSKTSGLALVNDASGDVVWAAELTHRGEQIKRDLDRRRAIRRKRRQRKTRYRKPRFTNRRKRRGTLPPSLESRVCNVLTWVCRLMKVCPVTNISQELVRFDTQALETPDIEGAQYQRGQLSGYEVREYVLLKWKHQCAYCDARDVPLELDHIDPRSRHGSNRVSNLTLACTPCNQRKSNQDVRQFLRDEPERLARILAQMKAPLRDAEAVNATRWMLNARLKTLGLPVECGSGGRTKCNRITRELPKTHWLDAVCVGRSTPESLIIKNIVPLQIRATGHGSRQMCRMDKYGFPRTGSKQHKRVQGFQTGDLVRAVVTSGTKQGTYVGKVAVRSRGTFNISTAHGVVTDIPHRFCVLVARSDGYSYQQGKEAAFPPSA

SEQ ID NO: 23434 - protein, 356 aa, unidentified
LQQTPSQGKHNLLLRQGRLIIKEVAYMSTVYVLNKNGKPLMPTTRCGHIRYLLKEKKARVVASKPFTIQLLYETNDVVQPLYLGIDPGRTNIGVAVVKTDGTAVFTAHLETRNKEIPKLMKKRKDSRRARRTNGRRCRRQRRAKANDTISKKCVKQATAQNGSVSKRAKEIGVIKRHLPGCEKEVLCIGIKNKEAKFSNRTRPEGWLTPTANQLLQTHINLVKKIRKFLPITDVVLEVNKFAFMRLDNPNVQKWQYQQGPLYQKASLEEAVSEMQERHCLFCKKPIAHYHHVVPQSENGSNTIDNIVGLCTKHHDLVHKDTTWQKKLAKKKTGLNKKYGAQSVLNQIIPALTERLN

SEQ ID NO: 23435 - protein, 446 aa, unidentified
LKGDLLLSAVTETRNKEITKLIDKRRACRRTSRNGERKARQRRAKRFGTTLKAGMLMRKLPKYDTDKFVTCKLIRNTESKFCNRKRPDGWLTPSARQLADTHINLIHKMQKYLPITDVAFEVNRFAFMLLKDPSVSGVDFQNGPLKGFDDLHDAVCELQDGTCLLCNRKIEHYHHIIPKSKNGSDTIDNIAGLCMCCHDKVHKNEKEAQRLQKKKKGLNKKYGALSVLNQAIPFICKRLEEEFGAEHVFYCTGRETAAVRNSFGYQKTKDNQLHEVDAWCIGILALGKIPKTLPDFSYTCRIRQFRRQDRSRIKAQTERTYKLEGKIVAKNRKKRTEQKTDSLEDWYQKQTALYGQKEADRMRSRLTAAKSQRRYNAPSRILPGTVFLYDGKRHVLSGQLTGGKYFRAVGDAKTNYPASKCRIVRKNEGLVFISQVITERVAVSHG

SEQ ID NO: 23436 - protein, 443 aa, Thiocapsa sp.
MVEENMTCFMQRKGEYPMVFVLDTNKCPLAPCHEAVARKLLKQGKAAIYKRYPFTIILKEIVDNFRPKTPYRLKIDHGSKHTGLAILRGQEVVWLGQLDHRTDIKERMDKRRAFRRARRNRKTRYRKPRFLNRRRKDGWLPPSLESRVQNIQTWVNRLKKLCPIGYISYENTKFDTQLMRNPEISGIEYQQGTLQGYEVREYLLEKFGRKCCYCGKENVPLEVEHIIPKSRGGTDRVDNLCLACHDCNQRKGSKTAEEFGYPHIQKQVKETLKDASAVNSTRWKVYEVLKQSGCEVECGTGARTKMNRIRLDLPKTHYFDACCVGESTPNHLYFKTKEVLFIRAKGRGSRSRTNLDRYGFPRGYLARQKFFFGFQTGDMVKAVIPRGKYQGVWFGEVSCRKTGSFDIKGKDGKRIAQGINYRYVQVIQRFDGYTYRREGMNIA

SEQ ID NO: 23437 - protein, 427 aa, Moorena sp.
MQNYVFVIDTNKQPLNPITPKKARRLLDKGKAAVFRMYPFTIILKREIENPSISPCQIKIDPGSKVTGFALVQNGQVIWGMELEHRGGLIKKKLESRCAIRRGRRNRNTRYRKPRFLNRKRPEGWLPPSLEHRILTIQTWVKRLIKFCMVNEIWIERVKFDTQKMQNPEINGIEYQQGELAGYEVREYLLEKWGRECTYCGKQNIPLQIEHIHPKSQGGSDRVSNLCLACEKCNQRKGNKPVEEFLKKKPSLLQKIKTKALSPLKDAAAVNATRNKLVKVLKSIKPIITGTGAQTKYNRTKLGFPKEHWIDAACVGDIETLVLRTSQPLFVTCKGQGGRQKAAPNKYGYPIRHNPLKPIKGWKTGDIAKHQKLGIGKVTPRTKGSFGFTPLGMKGYKSCKPQDISAVHRKDGYVYSFCKYLPGFTRE

SEQ ID NO: 23438 - protein, 548 aa, Erysipelotrichaceae sp.
MRRISPGMQGPGLIPRLPNPKDAPRLWKHYYRMLVPYRRRALQATAPESYERRHHDMPKTKLEQELSKADYIYVLSADGDPLMPTRRRGHVKRLLNRGKARIVSHVPFVIQLKYNGPKNTQPLFGGIDPGRTNIGAAVVTPEGKCVYRSHTVSRNRDVPKKMKARKLHRQASRRGERLRRKRRARANGTTTEFSNGRMLPGYKKPVMVKDIVNTTAKFNYRKRHEKWLTPTANQLVQTHENLICRISAILPVTDWTIEANKFAFMKMDNGKCYGVDFQNGRMKGYKNSHEYVYARQNGVCPLCGAPIEHYHHIIPRSQGGSDLPENILGVCMKCHERIHKGELKAGMKGVMKKYGALSVLNQAIPYIWQWMTETYGEDHAHFCTGMETKTMRDDSGLSKDHDIDALCIACIGSGIAPDRRIPRTFEIVQFRRHNRANINHQCERTYRLDGRIVCRNRHKRFEQKGDSLEEFRQKYPDQVSRLTVTKSTRYYNNTSRLMPGTVFLFGGERYVLQSQFTGGSYYHAVGCERNFPAAKCTIIRENAGLVYI

SEQ ID NO: 23439 - protein, 441 aa, Moorena sp.
ANFTRFGSKHKTMCNYVFVLDASHKPLNPCRPVTARKLLTAGKAAVYRRYPFTIILKKQVEAEPKPMSLKIDPGSKITGLAIVYGNQVVWSAEIEHRGSKIKSALDSRRAVRRSRRNRKCRYRKPRFNNRKRPEGWLAPSLQHRVATTMTWVLKLMKLTPIGGISQELVRFDTQKLQNPEISGIEYQQGELMGYEVREYLYQKWGRQCVYCGAKSVKLEVEHIIPKSKGGTNRVNNLTLACHRCNQAKGNLDARDFLSGKPDVLKRILGRAKQPLLDAAAVNSTRWQLYQSLKETGLSVAVGTGGRTKYNRIKLGLPKGHWVDAACVGEVATLKIVTRQPLLIKAMGHGCRQVIQMDKYGFPRKGYKPKHPVKGWKTGDIVNVVAGKNAGLKGVRIKTVRAKGNFDLIGADQDSSNKVNSASRNYIQCVHRQDGYYYSFAK

SEQ ID NO: 23440 - protein, 426 aa, unidentified; identical to SEQ ID NO: 3604
  source 1..426: note = Cyanobacteria bacterium UBA11366

SEQ ID NO: 23441 - protein, 554 aa, Acidithiobacillus sp.; identical to SEQ ID NO: 7890

SEQ ID NO: 23442 - protein, 421 aa, Aphanothece sp.; identical to SEQ ID NO: 5997

SEQ ID NO: 23443 - protein, 477 aa, unidentified; identical to SEQ ID NO: 12969

SEQ ID NO: 23444 - protein, 429 aa, Moorena sp.
MCNYVFVLDANHKPLNPCRAVTARKLLTAGKAAVYRRYPFTIILKKQVEAEPKPMSLKIDPGSKMTGLAIVYGNQVVWSAEIEHRGSKIKSALDSRRAVRRSRRKRKCRYRKRRFNNRKRPEGWLAPSLQHRVATTMTWVLRLIKLTPIGSISQELVRFDTQKLQNPEISGIEYQQGELMGYEVREYLYQKWGRQCVYCGAHSVKLEVEHIVPKSKGGTNRVSNLTLACHRCNQAKGNLNAQDFLLGKPDVLKRILARAKQPLLDAAAVNSTRWKLYQSLKKTGLSVEVGTGGRTKYNRIKLGLPKSHWIDAACVGEVATLEIVTRQPLLIKAMGHGCRQVIQMDKYGFPRKGYKPKHPVKGWKTGDIVNVVAGKNAGLKGVRIKSVRAKGNFDLIGADQDSSNKVNSASRNYIQCVHRQDGYYYSFAK

SEQ ID NO: 23445 - protein, 405 aa, unidentified
RQIPFTIQLTYENKPVLQPVTIAEDPGRSNIGMAVVSLSGELLSAAVVQTRNKEIVKLMEKRKQHRRASRNGERKARQRLAKKCHTMIKTGFLMRKLPMYGKDKRVRCNVIKNTEAKFCNRKREDGWLTPSAEHLVRTHINLIHKMQKFLPITDVAIEINRFAFLSLEDPSISGVDFQNGPLKGYDDLNVAIEDLQDGHCLMCNSPIEHRHHIVPRSMQGSNTIGNIAGLCCKCHERVHKDARFEDRLKKKKAGLNKRYAAVSVLNQAIPFICKRLEQEFGKEHVHYCSGRDTSMVRRSLGYHKTKEEQLHEVDAWCIAVLSLQHVPEKAPEFDHVHEILQFRRQDRSRIKAQTSRAYYHEGKKIAKNRKKAEGQKDDSLQGWRKRQVERYGEEQTRKMISQLKV

SEQ ID NO: 23446 - protein, 380 aa, unidentified; identical to SEQ ID NO: 3156

SEQ ID NO: 23447 - protein, 432 aa, Moorena sp.
MRVFVLDKNQKTLDPCRPARARILLKQGKAKVLKRYPFTIIMQEKEVENCVTHEHQLKIDPGAKTTGIVIIQGSKVIWGAELTHRGFQIREALTSRRQLRRSRRNRKTRYRQPRFLNRKRSEGWLAPSLMSRVDNILTWTKKLIRLCPIKGISQELVRFDTQKMENPEISGVEYQQGTLYGYEIREYLLEKWNRKCAYCGVDDIPLEIEHIKPKSKGGSDRVSNLTIACKKCNKAKGSQDIENFLSGKPNVLKQILSQSKKPLANAAAVNSTRWKLYNSLKSTGLPIETGSGGLTKYNRCRQNLPKTHWLDAANVGKVDHLYIESYQPLLITAKGHGTRQMCRTNKFGFPTRYVPRYKEIKGFQTGDIVKAIVTKGKKIGTYTGRVATRQTGSFNISTKPGLVQGISHKYCSVIHRKDGYSYSFVLQGMQWP

SEQ ID NO: 23448 - protein, 423 aa, unidentified
MVYVLDQNGQPLMPTSRHGKVRRMLQSGQAKVVNRCPFTIQLNYESGHQIQEISLGIDAGSKHIGVSATTKAKVLYEADVELRNDMVELLSSRRELRRGRRNRKTRYRKPRFQNRKRNEGWLAPSIRQKIETHMTVISKVCKILPIRKIIVETASFDIQKIRNPEIQGAEYQQGEQLGFWNVREYVLTRDNHTCQCCHGKSKDKILNVHHIESRKAGGNAPNNLITLCETCHTGHHQGTVKLPAEIKRGMSFKDATFMGIMRWTFYEDLKKKYEPFGISISNTYGYIMKHTRIEHDLQKEHYIDARCISGNPDALSNGEVYYQKKTRCHNRQIHKLTILKGGIRKKNQAEYVVKGFRLFDVVKARGTHWYIHGRRTNGSFVLKTLSGEKLEIVPNKIRFIIQQRGFITERRAVLTAANSAHRL

SEQ ID NO: 23449 - protein, 415 aa, unidentified
MVYVLANDGQPLMPTERHGKVCRMLKSGIAKVVKKCPFTIQLQYESERNVQPVALGIDAGSKHIGISATTKTKVLYESDVELRDDIVKLLATRRQLRRRRRSRKTRYRPARFDNRRRKEGWLTPSIRQKIESHLTVVANACKILPINQIIVETASFDIQKIKDPEIQGIEYQQGEQMDFWNIREYVLFRDGHTCQCCKGKSKDKVLNVHHIESRKTGGNAPNNLITLCETCHKGYHNGTVTLPKNIKRGMKFKDAAFMGIMRWTFYNTLKEQYEPDIPVHYTYGYITKNTRINHNLPKGHCIDARCISGNPDAVSDGTYYYQKKVRCHNRQIHKQTILKGGIRKSNQAEYLVRGFRLFDKVRYQGREYFIFGRRKSGFFDIRTLSGEKVNKGSISVKKLTFADTRKNYLIERRTV

SEQ ID NO: 23450 - protein, 420 aa, unidentified; identical to SEQ ID NO: 10900

SEQ ID NO: 23451 - protein, 381 aa, Moorena sp.; identical to SEQ ID NO: 15152

SEQ ID NO: 23452 - protein, 421 aa, Ktedonobacter sp.
MCLVYVLTPDSKPLMPCVPAIARLLLKEGQARVVRRTPFTIKLLTLPKTTYTQPVTLGVDTGSAVVGVASADESANILYLSEVELRNDIAATMKERASKRRNRRNRQTRYRQPRWLNRRKSIKQGRFSPTMRSKIDGHLREIRFVKSILPIRAIVLETGTFDPHALKNPEVLQNPSLYQKGINYGFANTKAYVLTRDSYMCQRCQGKSKDRRLEVHHLVFRRQGGSDDETNLLTLCKTCHDGLHAGTITLKRSGKKKGTLAHATQMNSIRVQLLKRLDTEETWGFVTKEHRLLAGLPKTHANDAAVMATRGKTPQFRTTQVILKKCIPDGDYQQTKGVRSEQPITTGKIRGFRKFDKVRYCGQEYFIKGRMSTGYAIFMGMDGKKVNLRPIPKFEKMKRVSARSSWIISQSIMPGFSSSTT

SEQ ID NO: 23453 - protein, 420 aa, unidentified
MVYVISQDGKPLMPCSDPIARLLLKQGKAKVKKREPFTIKLTYETTNHTQGLTLGVDTGSGTIGTAVSKDNGDIVYMSEVVVRNDITDKMTQRAKYRRNRRNRKTRYRKARWLNRASSIKKDRFSPTMQSKLHSHVREIEYIQSILPVTEMVFETGQFDMQLMKNPSLANPKVRPWGYQKGANYGFENTKAMVLNRDNYTCQCCKGKHKDSKLEVHHIVFRSQGGSDEESNLLTLCHTCHKDLHSGKINPKLSGKVKGNLKYATQMNSIRKQLFRFYPNAIETFGYVTKANRLHLGVDKEHYYDACTIATQGNAFNVKSNLYKKKCVSDGDFQKTKGIRSEQPIVTDKICGFRKFDKVRYFGNDYFIKGRMSTGYAILMDIDGNKIDFSTMPRGYKTPKLSNCKRITARSTVMTQVKVVR

SEQ ID NO: 23454 - protein, 529 aa, unidentified
MSTVYVLNKDGKPLMPTTRGGHVRHLLKNQKARVVRTKPFTIQLLYETNDVVQPLYLGIDPGRTNIGVAVVKTDGTAVFTAHLETRNKEIPKLMKKRKESRRARRTNGRRCRRQRRAKANDTISKKCVKQPTAQNGSISKRAKEIGIIKRRLPGCEKDVLCIGIKNKEARFNNRTRPEGWLTPTANQLLQTHINLVKKIQKFLPISDVVLEVNKFAFMQLDNPNIQKWQYQQGPLYKKESLERAVSEMQEHHCLFCDKPIDHYHHVVPQSENGSNTIANIVGLCAEHHNLVHKDAAWQKKLAEEKVGLNKKYGALSVLNQIIPALTKELSFLFPEHSFVTNGKSTYDYRATHGVSKDHWLDAYCIACSVLPSDVCDSNINNHMPYELKQFRRHDRRVLHKANTSRVYTLNGKKVATNRHKAAKQTADSLEEFRQSHPDDVCKLKVKEHHPAYRNLNRNYPGSVFFVGKQVHVMQGIASSKDGKATKYNDTSATTIAAGKCEFVAKNSGILFVQCKFRKVFSDETTKKLQ

SEQ ID NO: 23455 - protein, 448 aa, unidentified
MSTGLRAVQAEPAGIRKGDALKVFVLNMRGRPLMPCSPARARHLLKAGKAVVRRRTPFTIQLRIATGETKQSVTLGVDAGAKHVGLSAATEKEEVFASEVELRQDITGLLAARLSLRRDRRHRKTRYRAPRFLNRVRSKHKGWLAPSVENRIQAHMSRIDAVCRLLPVTKIVITTASFDVQKIKNPTIEGTDYQQGDQLGFWNVREYVLFRDGHICQHCRGRSKDPILNVHHLESRKTGGDAPNNLITLCETCHKAYHAGKIKLKVKRGQSFRAEAFMGIMRWTLLDRVRKAHPGLPVENTYGYLTKNTRITQGLPKTHCVDAYCIAGNLKAVRRGVYLHQRQVRKHNRQIHKCTVLSKTLKDGTKIGYRKLNQTPHLVKNFRLFDKVRCLGQTGFIFGRRSSGYFDVRRLDGVKISSCISYRKLTLLEKRSTYLTELRKEDGASSPV

SEQ ID NO: 23456 - protein, 544 aa, unidentified
MKQKKQKVMIYILNKKGKPLMPTTRCGHVRKLLDSKKAVVVNSNPFTIRLKYDTPNGIQDVFAGIDSGRENIGSGASNEDGDCLYLGELKTSNKSIKIKMTERTGFRRERRRHDRQSKQRKAKKDHTEIQNGNDDICRTTISCKSVQISYPVAEESVTHKIIRGKEGKFANRHRDEGWITPSARQLVQMHMNDLKSMCKILPISHVTLERVAFDFQKLENENIKVWEYGKGKLYGYDSPEEYIHDVQNGKCLVCGKPHIDYLHHIIPRSKGGSDKVSNIAGLCYDCHYGPMGVHNCQNTQDRLPELKSEANKQYKVSLLNSVMPVLIEEMDKFCKANSIMFSICEGHDTAKVRDMYDLQKDHCLDGFAISLVGRNVKSVDVMPDRIYQKQRYKKKSKNIIQKRNCREYYDDKKLVAVNRHKGTDQKADSLEEYMNTYAETHTADECKKHFDSLTVKPARRTYTFHKEWRICPFHIGDKVRYEKKNKIKGNTKVETFICESIHFYKDENKAKVEHNKTKSKRMKFCRVLEAGCTPYIDYRKLALM

SEQ ID NO: 23457 - protein, 557 aa, unidentified; identical to SEQ ID NO: 5269

SEQ ID NO: 23458 - protein, 318 aa, unidentified
LVKKIQKFLPISDVVLEVNKFAFMRLDNPNIQKWQYQQGPLYKKESLESAVSEIQEHHCLFCKKPIDHYHHVVPQHKNGSNTIGNIVGLCAKHHDLVHKDSAWEKKLAQKGTGLYKKYGALGVLNQIIPTLTNELSSLFPKHSFVTNGKSTYDYRAAHGVSKDHWLDAYCIACSVLPSNVCDSNINNHMPYELKQFRRHDRRVLNNENMNRVYTLNNKAVAINRHKAKDQKTVSLEEFRKEHPDDVCKLKVKEHHPTYRNMNRNFPGSVFLVGKQIHVMQGIASSKDGKATKYNDTSATAIAAGKCKFVAKNTGILFV

SEQ ID NO: 23459 - protein, 480 aa, unidentified; identical to SEQ ID NO: 2726

SEQ ID NO: 23460 - protein, 426 aa, unidentified
MVYVQNHLGQPLMPTQDHRKVRLLLKAGAAVVVRRTPFTIRLTTRTKTYVQPVILGVDAGSKTVGMSAATHEEEVFAAELTPRNDVVKNLADRREFRLSRRGRTTRYRQPRFNNRVHSKHKGWLAPSVEVKIQEHITSIKRACELLPIGKVVVETAEFDLQLLKSIADGMPVPQGENYQKGEMYGFYNVRQYVFFRDGYTCQCCGAHGKGIKFHTHHMESRKTGGNAPDDLVTVCDKCHKAFHAGLITDAKLKKRRRKSTRDAAFMGIMRKTLLQRLRAELPIPVVETRGYITKATRERLLKLPKSHTNDALAIAMGRHGFGIKEVTYMPQSDRIYQIKPVRHHNRQLHKAIPKKGGRRQRSQGPKYVQGFRRFDKVLYRGQECFIWGLRTRGYFQLKLLNGTKVHESAKASELILLEHRSGYLIA

SEQ ID NO: 23461 - protein, 372 aa, unidentified
KHIGLSATTEKDVMYEAEVELRNDIVKLLSTRREQRRSRRNRKTRYRKPRFDNRRRKDNWLAPSVQNKVDTHLTTVSKVTKMLPISKIIVEVASFDLQKLKADMEGIKRPEGVDYQNGEQSGFWNVREYVLSRDNHTCQCCKGKSKDKILNVHHIESRKTGGDAPNNLITLCEYCHSQYHKGNIKLPEKIKRGMSFKDAAFMGIMRWTFYNKLKEMYIPSGIEVKLTYGYITKNIRIKNQLPKEHCIDARCISGNPKAQSDGTVYKLKKVRCHNRQIHKCTINKGGARKLNQAPHTVFGFRLFDKVLYKNQECFIFGRRIDGRFAIRMLDGTKINEQLNYKKLKLVECAKHYITERRQVLCSAASYGVPAPD

SEQ ID NO: 23462 - protein, 415 aa, Parasutterella sp.
LMPCSPAKARLLLKEKKAIVVRRTPFTIQLTIATGEAKQPVSLGVDAGYKHVGLSASTEKAELYASEIELRQDITDLLSARRELRRARRNRKTRYRAPRFDNRIHTKRKGWLAPSVENRINAHLSRIEAVLRLLPVTKITVETASFDMQLLKNPDISGKEYQEGEQLGFWNVREYVLFRDGHVCQHCHGRSKDPVLNVHHLESRRTGGDSPGNLITLCETCHKALHRGEITLKAKRGQSFRAEAFMGIMRWEVLNRLKASHPELEVNNTYGYRTKHARISNGIAKSHCADAFCIAGYLGAKRLGKFFFQKQTRRNNRQIHKLSILKHGLRKRNQAPFEIKGFRLFDKVASKGEEGFIFGRRSSGYFDVRKLDGTRISAGISYKKLHLLEKRQTYITEIRKEKALPPLPEGRGLRA

SEQ ID NO: 23463 - protein, 400 aa, unidentified
AKIKKRTPFTIQLVYGSSGYTQEVILGVDAGSKTIGMSASTTKEELLSAEVKPRNDVVDLLSTRREFRRVRRNRKTRYRKPRFDNRVRSKHKGWLAPSVEVKIQEHITSIKRVCRILPVSKVVIETAEFDLQLLKAIADGKPVPQGEDYQKGEMYGHYNVRQYVLWRDDYTCQCCGAHATKKKEVRLHVHHLESRKVGGDAPDNQVTLCESCHEKLHKGLITEKDFKKRKRRSTRDATFMGIMRKTLMQRLCSELPIPVVETRGYITKATREKLLVLPKSHTNDALAIAQGKRGFNVGYLPGIIQTDKIYTIRPVRHHNRQLHKAAILKGGIRKSNQAGKYVFGYRLFDKVQFNGQDCFIWGRRTTGIFTIKTINGKMIKDGISFKKLKLAEKSTSYLIA

SEQ ID NO: 23464 - protein, 319 aa, unidentified; identical to SEQ ID NO: 4189

SEQ ID NO: 23465 - protein, 283 aa, unidentified; identical to SEQ ID NO: 14303

SEQ ID NO: 23466 - protein, 494 aa, unidentified
MDKDMIYVLDTNGSPLAPTHRHKHIHMLIKTKQAKVVSYHPFTIQLLYESEIPRVVPNYIGGMDPGRTNIGTNVIDKTGKSVYASHIETRNKDIVVLMKKRSAHRHASRNGERARRIRRARFHNTTFLYGDHYRQLPKCEENVLVHDIKNTEARFCCRTRPDGWLTPTANQLLQTHISAVKQTMKILPITDFVIELNTFDFEKLKNPNIKKWQYEKGALYQTTLHDAIDEQQNHHCLLCQNPIEHYHHVVHRKQNGSDTIDNLVGLCEVCHDKVHKHNEIEAKLLNKKEGLKKEFAGISILNQIFYPFINWLMNIFGEDHVFITNGKETAQFRKTYNVPKTHELDAFCIACSILENSIIDYNCRVFEIKQFRRHNRQLINSTRERKYYSVDRVKTTKTLKNGKTVTKTELKNKTLVATNRKKRTEQKVDSLEEYHTKLRQKYDKIITKKIISGLIVSKSTRGYRNPKTLMPGAVFIYQGKHYVLSRTANEGRYY

SEQ ID NO: 23467 - protein, 419 aa, unidentified; identical to SEQ ID NO: 18551

SEQ ID NO: 23468 - protein, 465 aa, unidentified
MNTCVCVLSNSGERLMPTFRLGKVRRLLKDGKAKIIKHHPFTIQLLYDSKTNTQPIEICEDVGYSYIGISVKSESHEYVSAQYDTLQDEKEHHDDCRMHRRTRRNRLRYRKPRFDNRKRGEGWLAPSLKHKKELNVNVVKMYCAVMSITHATVEVGSFDTMLVKAIQEGKVIPEGADYQKGPRYNLATLREAVFYRDNYVCKICGRKATEGAILHMHHMFYWKGRHGNSLDELLTVCEKCHTPANHQKSGKLYGFGEDVKFADLSGAAFMNTVRWQIVNELYAAFGKPFVTITYGAMTKEKRIALQLEKSHNNDAYAMGEFHPNHRCTFEHYEKVRRNNRILEKFYDSRYIDIRTGEITTGKALFNGRINRNHKKDSENLHKYRGKRIYAGHRALLRKKVNLNPGDFVSLNGETLVVHSTHTKKNGAVNVEFETPAKSGQKSASLKKLKIVKAANSIHPAWKKIS

SEQ ID NO: 23469 - protein, 424 aa, unidentified; identical to SEQ ID NO: 4955

SEQ ID NO: 23470 - protein, 470 aa, Anaerostipes sp.; identical to SEQ ID NO: 2825

SEQ ID NO: 23471 - protein, 348 aa, Anoxybacillus sp.; identical to SEQ ID NO: 18653

SEQ ID NO: 23472 - protein, 458 aa, unidentified
  VARIANT 13..14: note = X can be any naturally occurring amino acid
  source 1..458: note = Cyanobacteria bacterium UBA8553
LTRRTLPERRDSXXKVFLIDQGKQPLNPIHPAQARQLLRDGKAAVFRRYPFTLILKEEVSLLTLASCAGITSRTQRRSNPNINSLRIKIDPGAKTTGLALVDDNTGEVVWVAELQHRGFQIRDALTSRRQLRRSRRNRKTRYRKPRFLNRTRPKGWLPPSLSSRVANILTWVKRLSSSSQIIAISTELVRFDTQKMEDVEISGVGYQQGTLAGYEVREFLLEKWDRTCAYCGAKDTKLEIEHIQPRSKSGSNRASNLCLACVPCNQKKGNQDIKDFLKDKPDLLKRILSHAKKPLADTAAVNATRWNLYENLKKTGLPVEVGTGGRTKYNRTVRGLEKTHYWDAACVGVSTPEQLITSGVKPLRIAAKGHGTRQQCRTDKWGFPVRYCSRTKFHKGFQTGDIVAAVVTSGKKIGIYVGRVATRATGSFNISTPDGLIQGISHKYCTHIHKKDGYSYVQ

SEQ ID NO: 23473 - protein, 241 aa, unidentified
MVYVQDINGKSLMPTTRHGKVRRLLKDKKAVVVNLCPFTIKLMYITPDYKQEIVLGVDAGTKHVGLSATTKSKELYASEVILRNDIVDLLSTRRELRRTRRSRLRYRKPRFNNRIKSKRQEWIAHSVKYKIDAHIRVVEKVYSILPVSHIIIEVAQFDTQKIKNPDISGKEYQEGDQLGFWNVREYVLTRDEHKCQHCKGKSKDKILNVHHIESRKTGGNSPSNLITLCKTCHKEYHKGNI

SEQ ID NO: 23474 - protein, 515 aa, unidentified; identical to SEQ ID NO: 3339

SEQ ID NO: 23475 - protein, 419 aa, unidentified
MVYVINYDGQPLMPCSQAIARLLLKQGKAKCIKRTPFTIKLLYQTTNYTQGITLGVDTGSGKIGSSAVTENGNILYLSEIEVRNDITDKMTQRSKYRRNRRNRKTRYRKARWLNRKNSIKNDRFSPTMISKINSHLKEIKFVQSILPITKIILETATFDPHALKNPKVLSSKWLYQKGINYGFANTRAYVLNRDSYTCQYCKGKTKDRKLEVHHIIFRRNGGSDEAKNLITLCKTCHDNLHDGNISLKGGKAKGQLKHATQMNSIRQQLLKIVDCEETFGFITKEHRQILNLPKEHYMDAVAIASQGNNINFKTNQVLFKKCVSDGDYQQTKGVRSEQKIPTNKIMGFRKYDKVKYLDREYFIKGRMSSGFAILMDINGTKIDFNNAPKGMKTPKLNNMKRIGSRKTWIIQAETIQNIC

SEQ ID NO: 23476 - protein, 437 aa, unidentified
MNSHGHWQEGQFSERKAAEMLNNQKEYSFVLDVEGKKLDPTIVQNAWRLVRQKKATLIAKRPMTIQLKKVIDSPNDDEIRMGIDDGAKHVGLALVQKCKTKNKVVFVATMEHRNDVHKLIEQRRGYRQRRRYWKRYRKERFSNRASTRRKGRITPTILQKRQAVVRVVDRLSKDIRIDSIYLEDVAIDVRVLTDEKKLYSWQYQRSNRLDENLRKATILRDNCKCQLCGKRNCRLEVHHITPRRMNGANTIGNLITLCSECHSNVTGREIEFAEQLYSKIGKKKNNASLQYASHVMVGKTWLREELSKRTPVFLTTGGDTANKRIDWNLEKSHEIDAVCITNLEPESVGVKPWNVKPLRHQRKTMKVKEILGFRHRDIVCYTFKNGEYHEGYVTALYPSEGKQKEGLNFLSSTKHCKRVNPKKCQRLDRPDKFLWLA

SEQ ID NO: 23477 - protein, 447 aa, unidentified; identical to SEQ ID NO: 5309

SEQ ID NO: 23478 - protein, 399 aa, unidentified
LRVFLLNKRGKPLMPCSPAKARLLLKEKKAIVVRRTPFTIQLTIATGESKQPVSLGVDAGYKHVGLSASTEKAELYASEVELRPDVSDLLSARRTLRQSRRNRKTRYRAPRFDNRIRTKRKGWLAPSVENRINAHLSRIGAILRLLPVTKITVETASFDTQLLKNPDISGKEYQEGEQLGFWNVREYVLFRDGHACQHCHGRSKDPVLNVHHLESRRTGGDSPGNLLTLCETCHKALHRREIKLKTKRGQSFRAEAFMGIMRWEVLNRLKASHPELEVHNTYGYRTKHTRIVNGIDKSHCADAFCIAGNLGAKRLGEFFFQKQTRRNNRQIHKLSILKHGLRKRNQAPFEVKGFRLFDKVVCQGEEGFIFGRRSSGSFDVRKLDGTRISAGISCKKLRL

SEQ ID NO: 23479 - protein, 296 aa, unidentified
PSVENRINAHLSRIEAVLRLLPVTKITVETASFDLQLLKNPDISGKEYQEGEQLGFWNIREYVLCRDGHVCQHCYGRSKDPVLNVHHLESRRTGGDSPGNLITLCETCHKALHRGEITLKAKRGQSFRAEAFMGIMRSEVLNRLKASHPELEVNNTYGYRTKHARIANDIAKSHCADAFCIAGNLGAERLGEFFFQKQTRRNNRQIHKLSILKGGIRKRNQAPFEIKGFRLFDKVACKGEEGFIFGRRSSGYFDVRKLDGTRISAGISYKKLHLLEKRRTYLTEIRKEEAIPNSPA

SEQ ID NO: 23480 - protein, 443 aa, unidentified
LTKDENRPSGRTTGLRAEQAEPAGIRKGDTLKVFVLNMRGKPLMPCSPAKARHMLKAGKAFVVRRTPFTIKLTIATGETKQDVTLGVDAGARHVGISATTEKEEVFASEVALRQDITGLLADRLAFRRARRNRKTRYRAPRFNNRVRSKHKGWLASSVENRIQAHMSRIEAVCRLLPVTKIVIETASFDIQKIRNPEVEGTGYQQGDQLGFWNVREYVLFRDGHICQHCRGRSKDPILNVHHLESRKTGGDAPNNLITLCETCHKAYHAGKIKLKVKRGQSFRAEAFMGIMRWTLLDRVRKTHPKLPVENTYGYLTKHKRIALGLPKTHCADAFCIAGNLKALRRGDFLFQQQTRKHNRQIHKCSILKGGVRKLNQAPFLVKGFRLFDKVRIGGQIGFVFGRRVRGTFNIRRLDKTVIGTDINCKKLSLLETRKTFLTELRKE

SEQ ID NO: 23481 - protein, 417 aa, unidentified; identical to SEQ ID NO: 3910

SEQ ID NO: 23482 - protein, 392 aa, unidentified
MAVFVLDKKKQPLMPCSEKRARLLLQRGRAVVHKRYPFTIRLKDRVGGSTQPLSLGIDPGSKTTGLALIREPDSQQRHVLCLFELIHRGYQIKKALQQRAAFRRRRRSANLRYRAPRFNNRIKPKGWLAPSLQHRVDTVMAWVNRLSKSEPITGISQELVRFDTQKLESPEISGVEYQQGTLLGYEVREYLLEKWGRECAYCGTADTPLEIEHVVPRSRGGSNRVSNLTLSCHPCNAEKDSQTLTDFFATNKGLKKRLKANGHTANARLERVQRQLKQPLRDASAVNATRWALFSALKTTDLPVAVSSGGRTKYNRQRLNIPKTHALDAACVGAFGKLYDWTVPTLTIKAMGRGSYQRTRLTKHGFPRGYLMRQKQVHGFQTGHGACDSTHR

SEQ ID NO: 23483 - protein, 429 aa, Planktothrix sp.; identical to SEQ ID NO: 6772
  source 1..429: note = isolate UBA8407

SEQ ID NO: 23484 - protein, 413 aa, unidentified; identical to SEQ ID NO: 3023

SEQ ID NO: 23485 - protein, 470 aa, unidentified; identical to SEQ ID NO: 2825

SEQ ID NO: 23486 - protein, 420 aa, unidentified; identical to SEQ ID NO: 2681

SEQ ID NO: 23487 - protein, 480 aa, unidentified
LYTKPLDNIGEGSLPPSGEINLKGMTFMVYVKSIDGKALMPTSNAKARKLLKQKKAKVVSLRPFVVKLTYKTKTEYTQKLNLGVDSGYSNIGFSVIDAKQEYIAGEVKLLEGMKKRLLEKASYRRIRRSRLRYRKARWNNRVKSKKKGWLAPSLKHKLDTHIKFIDYLKNILPIGKITIEVANFDIQKIKDDLISDVDYQNGDMFGFWNVREFVLHRDGHKCQNPNCKHKDKKEQILKVHHIRYRSEGGSDRPENLITLCSKCHTPANHKKGKFLYDWCVNGKKVRGFKDATFMSMIRWYLVNELKSKHNNVSITYGYITKNHRIQNGIEKSHLNDAFAIAKGTNQVRTKDRFLVIQDRLKNRSLEKFYDSKIIDIRTEKKVSGGDLNCGRSTRNKNLNTEDLRKYRGVKISKGQRRIRKQKYFYQPNDLVKYDGKVYTVKGTQNEGKYIALKEIKKVPKVELLIPYVFKKGLNWSYGLC

SEQ ID NO: 23488 - protein, 432 aa, unidentified; identical to SEQ ID NO: 6070

SEQ ID NO: 23489 - protein, 406 aa, unidentified; identical to SEQ ID NO: 9290

SEQ ID NO: 23490 - protein, 395 aa, Pseudomonas sp.; identical to SEQ ID NO: 19354

SEQ ID NO: 23491 - protein, 418 aa, unidentified; identical to SEQ ID NO: 2710

SEQ ID NO: 23492 - protein, 418 aa, unidentified
MSVFVVGLNGCRLMPVSERKARLLLKGGKASVYRKVPFTIKLNYKTGSTVQPGYLGIDTGSQHIGVSVVQKDGTVLHKEEIGLRDSMSKRKLLESRASSRRGRRYRKTRYRHPKWKPKTKRIYNEKADRKGRHWKKQKNTFTSKRQAGWLPPSLQSKTDHHIQWIRKLLDLLPEGYRLSIELGRFDPARMKDPEIHGELYQKGPQYDYENVRAYVLARDGYTCRVCKKKGGKLHVHHILYRSRGASDNPKYMAAVCSKCHTTENHLPGGILYQWMQDQKKFTRGLRDATFMNILKKRLRKAFPDAVFTYGNITKADREKLELPKSHGNDATAIALVKTEVKSVKDEEPVIHIQQVRRKKRSLHEETPRKGRKEPNRTASRSDKNTKSVTVTKGSGEKKASMTACLFDRVELDGKKGWI

SEQ ID NO: 23493 - protein, 454 aa, unidentified; identical to SEQ ID NO: 13904

SEQ ID NO: 23494 - protein, 423 aa, Moorena sp.
MRVFVLNKNRQPLDPCKPARARILLSVGKAKVYRRYPFTIILTEEVKQPITHDHQLKIDPGAKISGLAIVQGKRVIWGSELTHRGFQIQEALTSRRQLRRSRRNRKTRYRKPRFLNRTRSKGWLAPSLTSRVQNILTWVKKLSRFCPVTGISQELVRFDTQKLQNPEISGIEYQQGTLYGYELREYLLEKWNRKCAYCGVAGTQLEIEHIKPLSKGGSNRVSNLAIACRRCNQAKSNQDIELFLSKKPSILKRILSQAKRSLADAASVNTTRWKLYHVLKSIGLPVEVGSGGLTKFNRCRQSLPKTHWLDAANVGKVETLIIEVTLPLAISAKGHGTRQLCRTNKYGFPTRHCSRIKFHKGFQTGDIVRAVVTKGKKIGTYVGRVATRKSGSFNISTKSGLVQGISHKYCKFIHRKDGYAYAN

SEQ ID NO: 23495 - protein, 448 aa, unidentified; identical to SEQ ID NO: 5196

SEQ ID NO: 23496 - protein, 423 aa, Arthrospira sp.; identical to SEQ ID NO: 2857

SEQ ID NO: 23497 - protein, 415 aa, unidentified
MIYVRSKDGKALMPSERRGRIGYLLRHGKAHVVSRVPFVVQLDYESTTYTQGVNLGIDAGSKHIGVSASSEKKELLAAQVELRSDVVNLLSTRRELRRTRRNRKTRYRKVRFDNRKRKDGWLAPSIEQKVECHLKVIRLVHKLLPITKTTIEVAQFDAQKIKNSDIKGEEYQQGEQMGFWNVREYVLARDGHKCVHCKGKSKDPILNVHHLESRKVGGNSPSNLVVLCETCHKAYHRGEFDLKIKRGTTLRDAAVMNIMRWSVYERAKAEFGNVYLTYGYITKHTRIENDIEKTHAADAFCIAKNVHARRSRTFFMCRCVPRHTRALHVANPKKSGIRRSCIASHKIGKSRFQRFDMVRWKGKECFIFGSTHGNVVLRKIDGVKVHETQAVSAKTIKFLKRIRNNILMEERASES

SEQ ID NO: 23498 - protein, 408 aa, unidentified; identical to SEQ ID NO: 17631

SEQ ID NO: 23499 - protein, 387 aa, unidentified
MVYVQDIDGKPMMPTTRHGKVRRLLKENKAVVVNTCPFTIKLTYKTSDYKQEIVLGVDSGTKHVGLSATTKSKELYASEVILRSDVVDLLSTRRGLRRTRRSRLRYRKQRFNNRVKSKKDGWIAPSVRHKIDSHVRIISFVYSILPVSKLIVEVAQFDTQKIKNPEISGKEYQEGEQLGFWNVREYVLARDGHKCQHCKGKSKDPILNIHHIESRKIGGDSPSNLITLCETCHKEFHKGNIKLKVSRGKSLRDAAVMGIMKWKLYEELKSRYDNVSMTFGYITKYNRINHGIEKSHVSDAFVISRNFNSCRLGYYYKRKLVRRHNRQIHKMKILKGGIRKRNQAPFKVFGFRLFDKVMFQGEEHFIYARRLSGQFNIRVIIGENKKY

SEQ ID NO: 23500 - protein, 431 aa, unidentified
MDAWDIIVVLNKRGKPLMPCSPAKARLLLKEKKAIVKRRTPFTIQLTIATGESKQPVSLGVDAGYKHVGLSASTEKAELYASEVELRQDITDLLSARRALRQSRRNCKTRYRAPRFDNRIRTKRKGWLAPSVENRINAHLSRIETVIRLLPVTKISVETTSFDMQLLKNSDIAGKEYQEGEQLGFWNVREYVLFRDGHVCQHCHGRSKDPVLNVHHLESRRTGGDSPGNLITLCETCHKALHRGEIKLKAKRGRSFRAETFMGIMRWGVLNRLKASHPKLEVHNTYGYRTKHARIANGIAKSHCADAFCIAGNFGAKRLGEFFFQKQTRRNNRQIHKLSILKGGIRKRNQAPFEVNGFRLFDKVACKGEEGFIFGRRSSGFFDVRKLDGTCISAGISYKKLHLLEKRRTYLTEIRKEEALPPPPEGRGLRA

SEQ ID NO: 23501 - protein, 470 aa, unidentified; identical to SEQ ID NO: 2949

SEQ ID NO: 23502 - protein, 274 aa, unidentified
LPITLVRVETAEFDTQRLKTMLEGKPLPVGKDYQLGEMYDEYNVRQYVLKRDNYTCQCCGVHTTAEKMVKLHVHHLESRKTGGNAPSNLITLCTTCHDALHKGKVSLDGKERGKPLRDAAFMGIMRKTLMGRLREELPISVQGTYGYITKMRREQNDIKKSHMNDALCIAKHPKAQHCENSYRSKAVRHHNRQIHKAKMLKGGIRKLNQAPYIVKGFRLWDKVLYNGQECFISGRRSSGYFALRKLDGTTITNSASFKKLQLLEATSSYLIERM

SEQ ID NO: 23503 - protein, 458 aa, unidentified; identical to SEQ ID NO: 4978

SEQ ID NO: 23504 - protein, 419 aa, unidentified
MYVYVLNKHGEPLMPCSAHKARVLLKNKKACVVKRTPFTIKLLYGSAGYKQPITLGVDAGSKHVGLSASTETHELYREEFTPRNDVVDLLSTRREFRRARRNRKTRYRAPRFNNRVHSKHKGWLAPSVEVKIQEHITVIKHVCQIMPILLVRVETAEFDTHRLKAMLEGKPLPVGTDYQLGEMYDEYNVRQYVLKRDNYTCQCCGAHATKTKQVKLHVHHLESRKTGGNAPSNLITLCPTCHKAIHEGKKTLGTKKRGKPLRDAAFMGIMRKTLLARLHKELSIPVQQTYGYITKMLREKNNLPKSHMNDALCIAKHPKAAPCENCYRSKAVRHHNRQIHKATILKGGIRKTNQAPYLVKGFRLWDKVRYNGQECFISGRRATGYFALRKLDGAIVTNSASYKKLRLLETAKNYLRERM

SEQ ID NO: 23505 - protein, 465 aa, unidentified
MNTCVCVLSNSGERLMPTFRLGKVRRLLKDGKAKIVKHHPFTIQLLYDSKTNTQPIEICEDVGYNYIGISVKSESHEYVSAQYDTLQDEKEHHDDCRMHRRTRRNRLRYRKPRFDNRKRGEGWLAPSLKHKKELNVNIVKMYCAVIPITHATVEVGSFDTMLVKAIQEGKAVPEGANYQKGPRYNLATLREAVFYRDNYACKVCGRKATEGAILHMHHMFYWKGRHGNSLGELLTVCEKCHTPANHQKSGKLYGYGEKIKFADLSGAAFMNAVRWQIVNELYTAFGKPFVTITYGAMTKEKRIALRLEKSHNNDAYAMGEFHPNHRCTFEHYEKVRRNNRILEKFYDSRYIDIRTGEIATGKELFNGRINRNHKKDSENLHRYRGKRTYAGHRALLRKKVNLNPGDLVSLNGEVLVVHGTHTNKKGAVNVEFKTPGKSGQKSASLKKLKIVKAADSMHSAWEKIS

SEQ ID NO: 23506 - protein, 424 aa, unidentified; identical to SEQ ID NO: 13009

SEQ ID NO: 23507 - protein, 430 aa, unidentified
MGELLRKEADYMLVYVINRHGKPLMPCKPQKARKLLKEQKAKVVKRTPFTIQLLYGSSGYKQDVTLGVDTGSKTIGLSATTENKEVFSAEVKLRTDIVDLLSTRRTLRRSRRNRKTRYRKARFLNKKKPKGWLAPSIKNKIDTHIKVVKMVYDILPITKIIVEVAQFDIHKINNPDIKGEEYQEGEQLGFYNVREYVLFRDKHTCQHCNGKSRDPILNVHHIESRKTGGNSPDNLITLCETCHRKYHAGELKLKGKRNSSFRDAAFMGIMRWAFYNKLKELYSNVSLTFGYITKNVRIKHNLEKSHRIDARCISGNPSTEESDCWYFFKQVRKQNRQLHKTNPKKGIRRENKAPGYVHGYQLFDKVEYLDRECFVFGRRSSGYFDLRTLDGEVVSRSASVGKLKLVERSSSLLCERREVSFLTALKHGVS

SEQ ID NO: 23508 - protein, 518 aa, unidentified
MGYVFVLDRDGNPLMPTTRCGKVRRMLKNGQAEVVSRIPFTIRLCYEPASKETQRLVYGCDPGRTNIGSAVVRENGYCVYLDKCTTRNREIPQLMARRRQHRQASRRGERLARKRLAKRLGTTTKKLLDRLLPGYEKPVRVKDIINTEARFNNRFRPKGWLTPTAMQLLRTHLNILKKVRKILPITDVVLEANKFAFMQLENPHIFRWQYQYGPLHGKGSVENAVKEQQRGTCIFCKHEIEHYHHIIPRSRGGSDTLPNMVGLCNACHDKVHKSEEWFQKLKKKKAGLNKKYGALSVLNQIIPYLVDQYAELFPDHTWVTAGYSTKQFREDHGIEKDHDRDAVCIACSILEKVDGIVFPEITYQMEQFRRHDRARIKSFRNRYYYLGKEKVAVNRKKAVLADPSGKEKNGKLKTQDSLEEWFAKEAESNGLQEAEKKCSRLRAVKSIRIRNNMQRPLPGSIFIFEGKRYLLTGNHGEYYQTKVAGKTVEFLKSKCEIAAGNQGLVYTSQVKSGASSHV

SEQ ID NO: 23509 - protein, 470 aa, unidentified; identical to SEQ ID NO: 2825

SEQ ID NO: 23510 - protein, 493 aa, unidentified; identical to SEQ ID NO: 2644

SEQ ID NO: 23511 - protein, 485 aa, unidentified
LVRHYSLIGTVLQSKTYHQRKERSVMLVYVLKQNGQPFMPTVRFGKVRRLLKTKKAKVVRREPFTIKLLYEPETDVVQECYCGVDTGSRHIGVAVVSNDKVLYQSQTELRNDIKRKMDARRAYRRNRRQRKTRYRQPRFLNRSNSTKSDRLPPSVKHKVQAHIDEIEFCKKILPISDSNLIIEVSQFDTALMKDPSLISEKIKHWGYQQGFNYGYSSRREAILHRDNYTCQCCGKKNCRLEVHHIKFKSDGGTDDEENLITLCEGCHKGVHAGTVTLDKKPKKSKNLKYATHMSIIRSYLLKKYPNAIETFGFVTSENRNHLQLKKDHHIDACIIASGGLNFEKLDVIYRKRRVSVQDRVLTKGVRGEQKLPTGKIFGFKKFDKVEYLGETCFIKARRSSGAFVLMDIDNNSIDFRDRGGKQNPSYMSIKRITTRESVLCISKRIEKEKRKIESDIENYKNLLRESEEKLRELTTKEGENNAIQD

SEQ ID NO: 23512 - protein, 428 aa, unidentified; identical to SEQ ID NO: 14464

SEQ ID NO: 23513 - protein, 417 aa, unidentified
MPCSPAKARLLLKQKEAIVKRRTPFTIQLTIATGEAKQPVALGVDSGYKHIGLSATTEKAELYASEVELRQDITDLLSARLALRRSRRSRKTRYRAPRFDNRVANKREGRLAPSVENRIAAHMSRVEAVMRVLPVTAITVETAAFDTQLLKNPDIAGAAYQQGEQLGFWNVREYVLFRDGHVCQHCRGKSKDPILNVHHIESRRTGGDAPNNLITLCETCHKAFHRGEIKLKVRRGKSFKAETFMGIMRWTLLERLKKAHPELRVRNTYGYLTKHKRISHGIAKSHCADAYCIADNLGAKRLEGFFFQKQTRKHNRQIHKLSILKGGLRKKNQAPYEVKGLRLFDKVICKGEEAFIFGRRTSGSFDVRRLDGTRISAGINYKKLRLLEPRTTYLTEFRKEAALPPLHKCRGFCAEFL

SEQ ID NO: 23514 - protein, 460 aa, unidentified; identical to SEQ ID NO: 7734

SEQ ID NO: 23515 - protein, 423 aa, unidentified; identical to SEQ ID NO: 3951

SEQ ID NO: 23516 - protein, 248 aa, unidentified
LPVGTDYQLGEMCDEYNVRQYVLNRDHYTCQCCGAHTTTKKTVKLHVHHLESRKVGGNAPSNLITLCTTCHDALHKGKVSLDNKKRGKPMRDAVFMGIMRKTLMARLREELPIPVQGTYGYITKMWREQNDIKKSHVNDARCISKHPLAEPCSVCYRTKAIRHHNRQTHKANFSKGGIRKRSQMPYVVGGYRLWDKVLYKGQECFVSGRRTSGSFTLKKLDGTRISKGVTFKKLRLLEPATNYLIERM

SEQ ID NO: 23517 - protein, 430 aa, unidentified; identical to SEQ ID NO: 15696

SEQ ID NO: 23518 - protein, 419 aa, Moorena sp.; identical to SEQ ID NO: 3955

SEQ ID NO: 23519 - protein, 522 aa, unidentified
MATDFIYVLDTDGTPLAPTHRHKHTRMLLKTGQAKVVCYRPYTIQLLYESETPRVVPQLIAGQDPGRTNQGTNVIDRTGKSVYAAHIETRNKEIPTLMKNRSANRRASRNGERARRIRKAKLHHTTFQYGDHNRKLPKCNETVPIHYIINTEAKFCCRTRPDGWLTPTANQLLQTHISEVKQLMKILPITDFVIELNKFDFAKLKDPTLQKWQYGKGSLYQTNLKDLIDEEQDHHCLLCKNPIEHYHHIVHKADNGSDTVENMVGLCKKCHTRVHKNQKVEEKVLSKKEGLEKKFAGTSILNQIFKPYIIWLIKTFGEDHVFITDGKTTAKFRNDYNVPKTHELDAYCIACSILENPTINYDCVVFEEKQFRHHNRQLINSTRERKYYHVDRVQTTKTLKNGKQVVKTELKNKTLVATNRKKRMDQKTDSLREYHMKLRQKYDKQTVKKIISGLVVVKSTRGYRDQNTIMPGAVFMYHGKHYVLSGTSNQGQYFRAVGQGKTNFPTKDCKIVRKNTGLVYLY

SEQ ID NO: 23520 - protein, 415 aa, unidentified
MVYVLANDGQPLMPTERHGKVCRMLKSGIAKVVKKCPFTIQLQYESERNVQPVALGIDAGSKHVGVSATTKAKVLYESDVELRDDIVKLLATRRQLRRRRRSRKTRYRPARFDNRRRKEGWLAPSIRQKIESHLTVVANVCKILPVSQIIVETASFDIQKIKNPDIQGIEYQQGEQMDFWNIREYVLFRDGHTCQCCKGKSKDKVLNVHHIESRKTGGNAPNNLITLCETCHKGYHNGTVTLPKNIKRGMKFKDAAFMGIMRWTFYNTLKEQYEPDIPVHYTYGYITKNTRINHNLPKGHCIDARCISGNPDAVSDGTYYYQNKVRCHNRQIHKQTILKGGIRKSNQAEYLVRGFRLFDKVRYQGREYFIFGRRKSGFFDIRTLSGEKVNKGSINVKRLTFVDTRKNYLTERRTV

SEQ ID NO: 23521 - protein, 421 aa, unidentified
MLVYVLKQNGQPFMPTSRFGKVRRLLKEGKAKVVRREPFTIRLLYEPETDVVQECYCGVDTGSKHIGVAVVSNNKVLYQSQTELRTNIKRKMDSRRMYRRSRRNRKTRYRKKRFLNRRNSIKKDRLPPSVQHKVQAHIDEIEFCKKILPVLDENIILEVSQFDTALMKNPSLMNEKIKHWGYQQGFNYGYSSRRGAILHRDNYTCQCCGKKNTRLEVHHIIFRSNGGTNDEENLLTLCEDCHKGVHAGTIVLDNKPKRMKLKYATHMSIIRSRLLKEYPEAIETFGFVTSENRNHLKLEKDHFIDACVIASGGLEFKPLDLTFYKRRVSKGDYQLCKGVRGEIKIPTRKVLGFRKFDRVKYLGKEYFIMSRASRGFARLMNIFGNKIDFSTMPKGYKTVKLSNCERVSARRSSLCFGQKLF

SEQ ID NO: 23522 - protein, 405 aa, unidentified
LKVFVLNMRGQPLMPCSPAKARHLLKAGKAVVRRRTPFTIQLRIATGETKQSVTLGVDAGAKHVGLSAATEKEEVFASEVELRQDITGLLAARLSLRRDRRHRKTRYRAPRFLNRVRSKHNGWLPPSVENRIQAHMSRIDAICGLLPVTKIVIETASFDIQKIKHPDVEGTDYQQGDQLGFWNVREYVLFRDGHVCQHCHGHAKDKILNVHHLESRQTGGDAPNNLITLCETCHKACHAGKIKLKVKRGQSFRAEAFMGIMRWTLLDRVRKAHPGLPVENTYGYLTKNTRITLGLPKAHCVDAYCIAGNLKAVQRGVYRHQRQVRKHNRQIHKCTVLSKTLKDGTKIGYRKLNQTPHLVKNFRLFDKVRCLGQTGFIFGRRSSGYFDVRRLDGVKIGSSRKSVER

SEQ ID NO: 23523 - protein, 417 aa, unidentified
MPCSPAKARLLLKEKKAIVKRRTPFTIQLTIATGEAKQPVTLGVDSGYKHIGLSATTEKAELYASQVELRQDITDLLSARLALRRSRRSRKTRYRAPRFNNRVASKRKGWLAPSVENRIAAHMSRVEAVMRVLPVTAVTVETAAFDTQLLKNPDIAGAAYQQGEQLGFWNVREYVLFRDGHVCQHCRGKSKDPILNVHHIESRRTGGDAPNNLITLCETCHKAFHRGEIELKVRRGKSFKAETFMGIMRWTLFERLKKAHPELRVRNTYGYLTKHKRISHGIAKSHCADAYCIADNLGAKRLSGYLFQKQTRKHNRQLHKLSILKGGLRKKNQAPYEVKGFRLFDKVICKGEEAFIFGRRTSGSFDVRRLDGTRISAGINYKKLRLLEPRTTYLTEFRKEAALPPLHKCRGFRAEFL

SEQ ID NO: 23524 - protein, 412 aa, unidentified; identical to SEQ ID NO: 4932

SEQ ID NO: 23525 - protein, 448 aa, Aneurinibacillus sp.; identical to SEQ ID NO: 9622

SEQ ID NO: 23526 - protein, 431 aa, unidentified; identical to SEQ ID NO: 7729

SEQ ID NO: 23527 - protein, 460 aa, unidentified; identical to SEQ ID NO: 7594

SEQ ID NO: 23528 - protein, 429 aa, Thioploca sp.
MQRVFVLDTKKKPLMPCHPARARKLLKKGKAAVYRRYPFTIILKERVDGQLQPVEIKFDPGSRTTGIALVGHFEGGSEVIWAGNLNHRGLQIKSNLVSRRAIRRSRRNRKTRYRPARFLNRRRPKSWLPPSLRSRVDNVKNWALKLSRLAPITQIAVETVRFDTQKMQNPEVSGMEYQQGELAGYEFREYLLEKWGRQCAYCGVQNVPLEVEHIQPRSKEGSNRVSNLTLACTKCNQKKGNKDVKDFLKGKPDRLKKIQAQAKASLRDTAAVNATRYAIGEALKTFGFVISFSSGGRTKFNRTQQGYPKEHWVDAACVGENGNPVAIPKAITPLIITAKGRGSRQKCRMNKYGFPRTGPKKHKRVKGFQTGDIVKAIVTKGKKIGTYVGRVAVRATGSFDIGSGIEAVGSISYKYCQLLQRSDGYDYLK

SEQ ID NO: 23529 - protein, 350 aa, unidentified
SEVELRKDINDLLSARRALRQSRRNRKTRYRAPRFDNRIRTKRKGWLAPSVENRINAHLSRIEAVLRLLPITKITVETASFDMQRLKNPDISGKEYQEGEQLGFWNVREYVLFRDGHVCRHCHGRSKDPVLNVHHLESRRTGSDSPDNLITLCETCHKALHRGEITLKAKRGQSFRAQAFMGIMRREVLNRLKASYPELKVHETYGYLTKNARIANGIVKSHGADAFCIAGNLGAERLGEFFFQKQTRRNNRQIRKLSILKGGIRKRNQAPFEAKGFRLFDKVACQGEEGFIFGRRSSGSFDVRKLDGTRISAGISCKKLRLLEKRRTYLTEIRKEEALPPLPEGRGLRA

SEQ ID NO: 23530 - protein, 516 aa, unidentified
  source 1..516: note = Methanobacteriaceae archaeon UBA541
MKYLDYTFVVDNNNVPCMPVTNNEAGYLIRCGLAKVINHDPFVIQRLDDYISESEIRDEITMKMDMGYMNVGFSVGTKDHEYLSGQVKLLNGISERLEQRASYRRTRRGRIRYRKNKNVDYKTIHNPTYKNGNEDNWIAPSVQHKIDSHVRLYRKIASWIPIDKVIIEIANFDIQAIKALKDGKEISGVDYQRGEMYGFENVKQYVRERDNYTCQICETDTIKKGTGLEVHHIIPRSQGGSNKPSNLISLCKKCHNKVHSNNNNNKYFRELQTRKINDTYKDATFMNTSRWRIYESIGSECPTYISYGYITSLNRKTNNLPKFHYVDAACIQKFTYKTLTRNIYLVEQKRCNDRCMSTFWDAKYIDSRDGKEKKGSELSYKRLPNATSKRTTRRKDVENDRIYRQRKTKKGEFRFVCNSRCLKAGDLIRINIGKRKGIIGEVTNSQIERDKYKIRFTYDGQDVKYPSISISKDEYNILKETGKCDSISIVRTRRGMIWRKYDRAKYESENVDQYSS

SEQ ID NO: 23531 - protein, 492 aa, unidentified
MTPVWEGRTFAYLPQSQKEEPAMSVFVVGLNGCRLMPVSERKARLILNDGKASVYRKVPFTIKLNYKTGSTTQPGYLGIDTGSQHIGVSVVREGGTVLHKEEIGLRDSMTKRKLLEAKASLRRGRRCRKTRYRHPKWRPKTKRVYCEVPDKKGRHWQKQKNTFISGRPEEWLPPSLQSKTDHHIRWIKKLQGLLPEWYRLSIELGRFDPARMKDPEIHGNLYQKGPQYDYENVRAYVLDRDRYTCQVCRRKGRKLHVHHILYRSQGASDTPQYMATGCSSCHTTENHLPGGILYQWMQEQKKFTRGLRDATFMNILRKRLMKTFPDAVFTYGNITKVDREKLKLPKSHGNDATAIALVRTGVTSVQDEEPVLYIQQVRRKKRSLHEETPRKGRKEPNRTAARNSKNTKAVTVTKRRDGKKVSVTACLFDRVELNGKKGWITGFTGKACRIVDTEGNYVAATDKYTQVNISSIRILHHTGNWVTGLKWNVGKR

SEQ ID NO: 23532 - protein, 470 aa, unidentified; identical to SEQ ID NO: 2949

SEQ ID NO: 23533 - protein, 482 aa, unidentified
LVWNVQAPWDVYPSPTLCGLCLKVLRGRNGDADKKPIPTLTKDENRPSGRTTGLRAEQAEPAGIRKGDTLKVFVLNMRSKPLMPCSPAKARHMLKAGKAVVVRRTPFTIKLTIATGETKQDVTLGVDAGARHVGISATTEKEEVFASEVALRQDITGLLADRLAFRRARRNRKTRYRAPRFNNRVRSKHKGWLAPSVENRIQAHISRIEAVCRLLPVTKIVIETASFDIQKIRNPEVEGTGYQQGDQLGFWNVREYVLFRDGHICQHCRGRSKDPILNVHHLESRKTGGDAPNNLITLCETCHKAYHAGKIKLKVKRGQSFRAEAFMGIMRWTLLDRVRKTHPKLPVENTYGYLTKHKRIALGLPKTHCADAFCIAGNLKALRRGDFLFQQQTRKHNRQIHKCSILKGGVRKLNQAPFLVKGFRLFDKVRIGGQIGFVFGRRVRGIFNIRRLDKTVIGTDINCKKLSLLETRKTFLTELRKE

SEQ ID NO: 23534 - protein, 397 aa, unidentified
LITGKHMSSTRYWHEEKFSERKVSEMTNYAFVLDANNKQLTPTKEQKAWFLIRKKRATLVSKYPMVIQLKKKIPDKEICKDEVRCGIDDGGLHVGVALVQKCQTRNKVVFKGVIEQRNDVKHLIDVRCGYRRYHRYHKRYRSARFNNRNSSKREERIAPSILQKRQATIRVINQLNKWINITNYWLEDVAIDIRALTDGYKPYRWQYQKSNRLDENIRKAVILRDGCKCMECGKSNCRLEVHHIKPRRLKGSSTLDNLITLCTKCHQKTESVEELYMDRYFALLNSSDNKNLNYAQHVMIGKKWLREQLSNLGMLYLTNGGDTANKRIDWDIAKSHSNDAICITDLRPDTCEIKEWAIKPMRRQSKAKTDNVLGIKHRDLVEYTFRNGKTHRGYVTA

SEQ ID NO: 23535 - protein, 447 aa, unidentified; identical to SEQ ID NO: 17795

SEQ ID NO: 23536 - protein, 419 aa, Moorena sp.
MQNYVFVIDTNFQALNPISPKKARKLLDKGKAAVFRMYPFTIILKTAIENPLLSPCQIKIDPGSKFTGFSLVQDNKVLWAMELQHRGSLIKKKLEARKALRSGRRGRNTRYRKPRFINRRRNDNWLPPSLEHRILTIQAWVERLIKFAPVSEIWIERVKFDPQKMSNPEISGIEYQQGSLAGYEVREYLLEKWGRKCTYCGKKDIPLQIEHIKPKSKGGSNRVSNLCLSCQKCNQKKGNKSVEDFLKNKPGLLQKIKSLAKKPLQDAAAVNATRNKLVKVMNGILPVITGTGAQTKYNRTRLGLPKQHWIDAACVGEVEFVELLTLQPLIVTCKGQGGRQKAALNKYGYPIRHNPLKPIKGWCSGDIAKNLLTGDFGRVNPRSSSNSFNFIVPGRKAVNIHCKNLIRVHRKDGYIYSFS

SEQ ID NO: 23537 - protein, 442 aa, Sutterella sp.; identical to SEQ ID NO: 3037

SEQ ID NO: 23538 - protein, 305 aa, unidentified
MVYVQDINGKPLMPTTRHGKVRRLLKDKKAVVVNLCPFTIKLMYVTSDYKQEIVLGVDAGTKHVGLSATTKSKELYSSEVILRNDIVDLLSTRRELRRARRNRLRYRKPRFNNRIKSKRPGWIAPSVKYKIDAHIRVVENVCSILPISRIVIEVAQFDTQKIKNPNISGKEYQEGDQLGFWNTREYVLARDGHKCQYCKGKSKDKILNVHHIESRKTGGDSPSNFITLCETCHKEYHKGNIDLKIKRGKSLRDAAVMGIMKWRLYEEIKSKYDRVSMTFGYVTKYNRINHGFEKSHVSDAFVISK

SEQ ID NO: 23539 - protein, 465 aa, unidentified
MSTCVCVLSNNGERLMPTIRLGKVRHLLKDGKAKIIKHHPFTIQLLYDSETNIQPIEICEDVGYNYIGISVKSQSHEYVSAQYDTLQDEKSCHDACRRMRRTRRNRLRYRQKRFDNRKRDKGWLAPSLKHKKELNVNVIKMYCEVVPITHATVEVGSFDTMLVKAIEEGKATPEGADYQKGPRYNLATLREAVFYRDNYTCQVCGREASEGAILHVHHMFYWKGRHDNSLSELITVCEKCHTPANHQKGGKLYGFGEDIKFANLSGAAFMNTVRWQIVNELYAAFGKPFVTFTYGAMTKEKRIALHLEKSHNNNAYAMGEFHPNCRCTFEHYEKVRRNNRILEKFYDSRYIDIRTGEIATGKELFNGRINRSHKKDSENLHKYRGKRIRKGYRALRRKKVALNPGDLVSLNGEILTVHGTHTKKNGSVNVEFKTPSKSGKKSTSLKKLKIIKTISPMRSAWDKVS

SEQ ID NO: 23540 - protein, 415 aa, unidentified
MVNRIEYCFVVDKNNKPLAPTKINKGWYLIRKGRAKLKSKYPMVIQLEKEVESDEGDKSHIACGIDDGSACVGLAIVQKCLTKNKVVFKGTIEQRQDVKHLMDVRRGYRKYRRYHKRYRKARFNNRSSSKSTCRSAPSIKQKKDAVLRVLYQLNKWVNIQEYYLEDVCIDIRAMVDGYKPYRWQYQKSNRLDENLRKATILRDGCRCQECGKSNCMLEVHHIRARRYGGADTIGNLITLCEKCHDKTKGREKDFEERYFNVIKSKPKRFDYAMHVMQGKVYLREKISELGILHLTNGGETANKRIEWNIVKTHSNDAICIADGIPDTCDIKEWIIKPMRRKSKAKTDNILGIKHRDLVTYTYKNGETHTGYVTALYPEQLALNFQSKTKHCKKVNARKCRLLWKFNKIYWLEQCV

SEQ ID NO: 23541 - protein, 397 aa, unidentified
  source 1..397: note = Bacterium sp.
LRVYVINQKKEPLMPTTPRKARKLLEQGKAKVINREPFTIQLLVATGETKQDITLGVDAGSRYIGLSATTEKQELFSAEVELRNDIVDLLATRRQNRRSRRSRLRYRKPRFLNRVSSKNKGWLAPSIEHKINTHLRVINDVHKILPITKIIVEVASFDIQKIKNPAIEGAEYQQGDQLGFWNTREYVLHRDGHKCQHCLGRSKDVVLEVHHIESRKVGGDAPNNLITLCNTCHEAYHDGQINLKAKRGQSFKDATFMGIMRWTFYNKLKDLYPNIKMTYGYITKNTRITNKLPKSHRTDALCITGNPTVKRLDNWYYIKKVRKHNRQIHKANISKGGKKKLNQAPYLVKGFRLFDKVMYDNQECFIFGRRSSGYFDLRKLDGTVVHRSANCKYLKLL

SEQ ID NO: 23542 - protein, 429 aa, unidentified
QNLRVFVLNKRGQPLMPCSPAKARLLLKEKKAVVMRRTPFTIQLTQATGETVQPVKLGVDAGSKFIGLSASTDKAELYASEVELRTDVVDLLSSRRELRRARRNRKTRYRAPRFNNRVHSKNKGWLAPSVENKINAHLSRVDAVRQLLPVTKIVVETASFDIQKIKNLDIEGADYQWGEQLGFWNVREYVLFRDGHRCCYCHGKSKAPILNVHHLESRKTGGDAPNNLITLCETCHKAYHAGKIVLKAKRGQAFRDAAFMGIMRWTFFNRLKAQCPELDVRNTYGYLTKNTRIRHGLDKSHHTDAFCIAGNFGAKRLGEYFFQKQTRKHNRQIHKMSILKGGVRKRQQAPYEVKGFRLFDKVRYGSREAFIFGRRNSGYFDIRLLKGEKVSPAISYKYLQLLESRKTFLTQLIKEDAIPPATEVAGFLA

SEQ ID NO: 23543 - protein, 436 aa, unidentified
MSNHVFVLDTNRQPLTPCNPGVARSLLKSRKASVFRCYPFTIILKKEVNSTPEPCQIKIDPGSKTTGIALLNGDKVIWAAELTHRGQQIKNDLESRRSLRRNRRGRKTRYRQPRFLNRTRPRGWLPPSLKHRVLTVLTWVKRLTRLCAVSSIAQELVKFDLQKMQNPEISGVEYQQGELQGYEVREYLLEKCGRKCAYCGAENVPLEIEHIHPRSKGGSNCVSNLTLACAPCNQAKGNQDIKQFLNGKPDLLKRVLVRAKAPLKDAVAINASRWALFNALKSTGLSVSTGSGAQTKFNRRRLGLLKTHWLDAACVGNIEALEVLTTQPLLIKSAGHGRRQVIQVDKYGFPRHNQAGELVRKSAQVKQIKGFQTGDIVRAIVPSGKKTGVYIGRVAIRSSGSFNIKTPNGTVEGISFKHCSFVQRKDGYSYSFSDGR

SEQ ID NO: 23544 - protein, 443 aa, unidentified
LTKDENRPSGRTTGLRAEQAEPAGIRKGDTLKVFVLNMRGKPLMPCSPAKARHMLKAGKAVVVRRTPFTIKLTIATGETKQDVTLGVDAGARHVGISATTEKEEVFASEVALRQDITGLLADRLAFRRARRNRKTRYRAPRFNNRVRSKHKGWLAPSVENRIQAHMSRIEAVCRLLPVTKIVIETASFDIQKIRNPEVEGTGYQQGDQLGFWNVREYVLFRDGHICQHCRGRSKDPILNVHHLESRKTGGDAPNNLITLCETCHKAYHAGKIKLKVKRGHSFRAEAFMGIMRWTLLNRMRKAHPSLPVENTYGYLTKHKRIALGLPKTHCADAFCIAGNLKALRRGDFLFQQQTRKHNRQIHRCSILKGGVRKLNQAPFLVKGFRLFDKVRIGGQIGFVFGRRVRGTFNIRRLDKTVIGTDINCKKLSLLETRKTFLTELRKE

SEQ ID NO: 23545 - protein, 415 aa, unidentified; identical to SEQ ID NO: 13008

SEQ ID NO: 23546 - protein, 414 aa, Moorena sp.
  VARIANT 414: note = X can be any naturally occurring amino acid
MQNYVFVIDTNKQPLNPIPPKKARRLLDKGKAAVFRMYPFTIILKTAVDNPSGSPCQIKIDPGSQTTGFALVQNNQVIWGMELEHRGGFIKKKLESRKAVRRGRRNRHTRYRKPRFLNRKRSEGWLPPSLEHRVSTIETWVKRLTKFCPINEIWVERVKFDTQKMQKPEISGVEYQQGELAGYEVREYLLEKWGRECTYCGKQSVPLQIEHIQPKSFGGSNSAKPTLRERVSNLCLACEKCNQRKGNKPIEEFLKNKPILLQKIKTKTKQPLLDSAAVNTTRNKLVKVLQNILLVVTGTGAQTKYNRIKLGLPKQHWIDAACVGDIETLVLKTSQPLLVTCKGQGGRQKAALNKYGYPIRHNPLKPIKGWVTGDIAKHQKLGIGKVTPRSKGSFGFTPLGMKGYKSCKPQDISX

SEQ ID NO: 23547 - protein, 431 aa, unidentified; identical to SEQ ID NO: 6230

SEQ ID NO: 23548 - protein, 456 aa, unidentified; identical to SEQ ID NO: 7564

SEQ ID NO: 23549 - protein, 447 aa, Halolactibacillus sp.; identical to SEQ ID NO: 9617

SEQ ID NO: 23550 - protein, 475 aa, unidentified
MQLYLVSIFSQGLHNLLLRQKRFIVKEVAYMATVYVLNKDGKPLMPTTRCGHIRHLLKEKKARVVRTNPFTIKLVYETDDVVQPLYLGIDPGRTNIGVAVVKVDGTAVFTAHLETRNKEIPKLMAKRKEHRQGRRHYRRCKRQRRAAAHGTLSKKCKKQDTAQGGNISKRAQTIGVFERNLPGCEKSVLCIGIKNKEARFNNRVRPARWLTPTANQLLLTHVNFVKKICKFLPISDVVLEINKFAFMALDNPNIQKWQYQQGPLYQKGSLENAVSEQQDHHCLFCEKTIEHYDHVILRSENGSDTIANIVGLCAEHHDLIHKDDKLKEELAKKKQGLNKKYGALSVLNQIIPALTYELGSRFQGHFYVTTGKSTYDYRAAHSVSKDHWLDAYCIACSVLPDGCFDNTINSRVPYELKQFRRHDRQVCQQQNVKRKYYLDKKLVATNRHKAIKQETDSLEEYRNNGGTTDKLVVKE

SEQ ID NO: 23551 - protein, 436 aa, unidentified
MTKTLTTQTTQACVLDQQGKPLMPTTRLGKVYRLLKTKKAHIVSYEPFTIQLDYEPDTHIIQPMTLGVDSGAIHSGYSIANEHREYYSAEVIARDDISKRLLNRRMCRQNRRSRKIRYRKPRFNNRKNKRKGWLAPSLQQKVAVQINEIDHLHRYFPIETIIVETAEFDIQKIKNPDISGIEYQQGTLQGYNIRNYLLEKHNHKCFYCEKTVSGFEVEHMLPKSRGGSDRIDNLTLSCHDCNQKKDTSTAEEFIKQTLPAKKATMKLKQLPNEKRLFKYMAHMNTTRWTLYNTIKEKYPNVKMTYGYITKYNRIQAGLPKAHHIDAKCITGFATVPSIDQTVVKVKMRRHNRRLHRATFSKGHVRKDACLITVIFGFQLYDLVSFNNHRYYIKGRRSSGYFALISVEGLKDENRSYKKLTLLAHTNAYLTNHYVDL

SEQ ID NO: 23552 - protein, 512 aa, unidentified; identical to SEQ ID NO: 7699

SEQ ID NO: 23553 - protein, 430 aa, unidentified
PGKVYVISRLGHPLMPCSPAKARHLLDDGKAKVVKRTPFTIKLLYGSTEYTQPVILGVDAGSKTIGLSASTTKEELFAAEVMPRNDVVENLSTRREFRRARRNRTTRYRKSRFNNRVHSKNNGWLAPSVEVKIQEHITSIKRVCAILPISKIVVETAEFDLQLLKAVQDGKPVPEGEDYQKGEMYGSYDVRQYVLWRDNYTCTCCGVKGTDKKPVKLHVHHFESRKHGGNAPDNYGTLCEDCHKKLHLGIITDISLKTRKRPSTRDAAFMGIMRKTLMQRLITGLSIPVAETKGYITKAAREEILKLPKTHTNDALAIAQGRHGFGIREQAYVKPTNRIYTVRPVRHHNRQLHKATILKGGIRKLNQASKYIFGFRLYDKVLYQGGECFVWGRRTSGSFLLRTIDGTKVKDGVGYRNLTLLERSTNYLIA

SEQ ID NO: 23554 - protein, 356 aa, unidentified
MHMNDLKSMCKILPISHVTLERVAFDFQKLENENIKVWEYGKGKLYGYDSPEEYIHDVQNGKCLVCGKPHIDYLHHIIPRSKGGSDKVSNIAGLCYDCHYGPMGVHNCQNTQDRLPELKSEANKQYKVSLLNSVMPVLIEEMDKFCKANSIMFSICEGHDTAKVRDMYDLQKDHCIDGFAISLVDRNVKSVDVMPDRIYQKQRYKKKSKNIIQKRNCREYYDDKKLVAVNRHKGTDQKADSLEEYMNTYAETHTTDECKKHFDSLVVKPARRTYTFHKEWRICPFHIGDKVRYEKKNKIKGNTKVDTFICEGIRFVKDENKAEVKHNKTKSKKMKFCRVLESGCTPYVDYRKLALM

SEQ ID NO: 23555 - protein, 470 aa, unidentified; identical to SEQ ID NO: 2825

SEQ ID NO: 23556 - protein, 440 aa, unidentified
MQNALVVSSTRQQLMPCSPARARILLRSHKAAVLRRYPFTIILKDRAEGDTQSVELKVDPGSKVTGIALAADYAKRGKTVVFAAEVQHRGQAVKDALDSRRAIRRGRRTRKTRYRAPRFDNRTREIGWLPPSLMSRVFNVTTWALRLQRFAPLSGIAVETVRFDTQLMVNPDISGVEYQQGTLAGYELREYLLQKWSRTCAYCKKRDIPLQVEHIVPRSRGGSDRVSNLTLACEPCNLKKGNMTAAEFGFQNIQRQAQSPLKDAAAVNATRYMIGDMLRILGLPIEFWSGGRTKFNRVQQGYAKAHWIDAACVGESGVSVSLNPDSQVLQVKAAGQGTRQMCRMDKFGFPRTSAKTERVVKGFRTGDIVRAIVPSGKKAGLHCGKVAVRSSGSFNVSTLAGVIQGISYKYCSVLHRADGYSYLKGEAIPLGNKLPGILAA

SEQ ID NO: 23557 - protein, 421 aa, Methanosarcina sp.
MLVFVINQNKKPLMPCKPSKARKLLQAGKAKVVRNTPFTIKLLFRSSGYTQPVTAGMDTGSKVVGCAAIANGKVLYQSEIYLRENVSKKMEQRKMYRRTRRSRKTRYRPARFDNRGNSKKEGRLAPSIRSKLEAHFREKRFVESLLPVTEWKVELASFDIHKITNPEVSGIGYQEGDLKGFYNIKAYVLDRDGYTCQHCRGKSKDSRLHCHHIVFRSQKGTDAPENLITLCETCHKALHNGEFKLSGKKSKTKHATEVGIIKSQIRKSGWNFAETFGYETKYRREQVLKLLKTHYFDAVAICCRDEQKVEVEESVFLKRNVSKGDYQQRTGKRSEKKIHTGKLFNLRKFDLVKTSKGIGFVKGKRSSGFFAISDMFGNKISDSVNVKKICERLRARTSTLIQQSRTGKFTHSSPELKTQGF

SEQ ID NO: 23558 - protein, 465 aa, unidentified; identical to SEQ ID NO: 8068

SEQ ID NO: 23559 - protein, 439 aa, Halomonas sp.; identical to SEQ ID NO: 19319

SEQ ID NO: 23560 - protein, 431 aa, unidentified
MPNKVYVINKHGRPLMPCSPAKARHLLDAGKAKIKKRTPFTIQLVYGSSGYTQEVILGVDAGSKTIGVSASTKKEELFAANVIPRNDVVDLLSTRRESRRARRNRKTRYRKPRFDNRVRSKHKGWLAPSVEVKIQEHITSIKRACRILPVSKVVVETAEFDLQLLKAIADGKPVPQGEDYQKGEMYGHYNVRQYVLWRDNYTCQCCGAHATKKKEVRLHVHHLESRKVGGDAPDNQVTLCESCHEKLHKGLIAEKDFKKRKRRSTRDATFMGIMRKTLMQRLCSELPIPVIETRGYITKATREKLLVLPKSHTNDALAIAQGKQGFNVGYLPGILQIDKIYTIRPVRHHNRQLHKAAILKGGIRKSNQAGKYVFGYRLFDKVQFNEQDCFIWGRRTTGIFTIKTINGKMIKDGISFKKLKLVEKSTSYLIA

SEQ ID NO: 23561 - protein, 451 aa, unidentified
VLSAWNPFQHWRRITTGRKTEETNLRVLVWNKRGKPLMPCSPAKARLLLKEKKAIVVRRTPFTIQLTIATGETKQPVSLGVDAGYKHVGLSASTEKAELYASEIELRQDITDLLSARRELRRARRNRKTRYRAPRFDNRIRTKRKGWLAPSVENRINAHLSRIEAVLRLLPVTKITVETASFDMQLLKNPEISGKEYQEGEQLGFWNVREYVLFRDGHVCQHCHGRSKDPVLNVHHLESRRTGGDSPGNLITLCETCHKALHRGEITLKAKRGQSFRAEAFMGIMRWEVLNRLKASHPELEVNNTYGYRTKHARISNGIAKSHCADAFCIAGNLGAKRLGEFFFQKQTRRNNRQIHKLSILKHGLRKRNQTPFEIKGFRLFDKVACKGEEGFIFGRRSSGYFDVRKLDGTRISAGISYKKLHLLEKRQTYITEIRKEKALPPLPEGGGLRA

SEQ ID NO: 23562 - protein, 420 aa, unidentified; identical to SEQ ID NO: 15856

SEQ ID NO: 23563 - protein, 512 aa, unidentified; identical to SEQ ID NO: 6489

SEQ ID NO: 23564 - protein, 445 aa, unidentified
YGNSMELRITYCKVEYFQGVDTLVYVISIDGKPLMPCKPVIARLLLKQHKAKVIKKYPFTIKLLYKTKTEYTQPLTLGIDTGSSKIGSAVVDENNNVLYLSQVEVRNDITDKMKQRAKYRRNRRNRKTRYRKARWLNRKNSIKEDRFSPTIVSKINSHLKEINFVKSILPIQNVILETATFDPYALKNPAVLHNKWLYQKGVNYGFANTRAYVLDRDNYTCQYCKGKSKDSKLEVHHIIFRSQGGSDESKNLITLCKTCHGKLHNGKINLKKNGKVKGQLKHATQMNSIRQQLLRLLPEAAETFGFITKEHRQLMKLPKEHYYDAVAIACLNNIENTGLIGVNFKTKNILFKRCIADGDFQQTKGVRSEKRITTGKIQGFRKFDKVEYQGKEYFIKGRMSTGYAILMDIEGNKINLKPIPKFEKMKRMQARKSWIISQETIQNIC

SEQ ID NO: 23565 - protein, 441 aa, Acidithiobacillus sp.; identical to SEQ ID NO: 5206

SEQ ID NO: 23566 - protein, 477 aa, unidentified; identical to SEQ ID NO: 12969

SEQ ID NO: 23567 - protein, 400 aa, unidentified
VTTILKTCFAASNLAKIVVLMDAWDIIVILNKRGKPLMPCSPAKARLLLKEKKAIVVRRTPFTIQLTIATGEAKQPVSLGVDAGYKHVGLSASTEKAELYASEVELRQDVSDLLSARRALRQSRRNRNTRYRAPRFDNRIRTKRKGWLAPTVENRINVHLSRIETVLRLLPVTKITVETASFDTQLLKNPDIAGKEYQEGEQLGFWNVREYVLFRDGHVCQHCHGRSKDPVLNVHHLESRRTGGDSPGNLITLCETCHKALHRGEIKLKAKRGRSFRAETFMGIMRWGVLNRLKASHPKLEVHNTYGYRTKHARISNGIAKSHCADAFCIAGNLGAERLGEFFFQKQTRRNNRQIHKLSILKGALRKRNQAPFEVKGFRLFDKVACQGEEGFIFGRRSSG

SEQ ID NO: 23568 - protein, 404 aa, Ktedonobacter sp.
  VARIANT 319..332: note = X can be any naturally occurring amino acid
  VARIANT 404: note = X can be any naturally occurring amino acid
MPCTPKRARLLLGRGRAVVHRVKPFVIRLRDRRVEDSTLQPLALKIDPGSKTTGIAVARVQETEEGEVHHAVFLFEVAHRGDKVQGAKQTQRNARRRRRSANLRHRAPRFANRGIPKGWLPPSLLSRIGNVLTWTGRCRRWVAVSRIDVERVRFDTQLLQHPEIAGVAYQQGTLAGWEARAYLLLKYAYRCAYCGKTDCAFELDHIVPRSRGGSNRVSNLCLACHACNQAKGDKTAAEWGHPEVEAQAKQALKDAAAVNATRFKLVEALQVFGLPIGTWTGGRTRWNRARFGIDKTHALDALCVGQMAAVSAARLKTLXXXXXXXXXXXXXXLPDTSETRPWLSDRRPGASSGPCSSQNGGNPSGTRAGAQKRIVSCRLRRWGWSGVLPDGAESRWVWVCACLX

SEQ ID NO: 23569 - protein, 378 aa, Moorena sp.; identical to SEQ ID NO: 2642

SEQ ID NO: 23570 - protein, 419 aa, unidentified
MVYVISQDGKPLMPCSNSIARLLLKQSKAKVKKREPFTIKLTYETTNYTQDLTLGVDTGSGTIGTSVSKDNGDIIYMSEVVIRNDITGKMTQRAKYRRNRRNRKARYRKARWLNRANSIKNDRFSPTMQSKLHSHVKEIKYIKFILPITEMVFETGQFDTHLMKNPNLANPKIKHWGYQKGINYGFENTKAMVLNRDNYTCQYCKGKHKDSKLEVHHILFRSQGGSDEESNLITLCHTCHKDLHSGKINPKLSGKVKGNLKYATQMNSIRKQLFRFYPNAIETFGYVTKANRLHLGVDKEHYYDACTIATQGNIFTVKSNLYKKKCISDGDFQKTKGIRSEQPIITDKICGFRKFDKVRYFGNKYFIKGRMSTGYAVLMDIDGNKVDFSAMPKGYKTPKLSNCKRIMARSTEMIQTLVI

SEQ ID NO: 23571 - protein, 432 aa, unidentified; identical to SEQ ID NO: 2970

SEQ ID NO: 23572 - protein, 507 aa, unidentified
MSEYIYVIGVDGNPQMPTKRKRHVEKLLQAGRARVFRQIPFTIQLTYENKPVLQPVTIAEDPGRSNIGMAVVSLSGELLSAAVVQTRNKEIVKLMEKRKQHRRASRNGERKARQRLAKKCHTMIKTGFLMRKLPMYGKDKRVRCNVIKNTEAKFCNRKREDGWLTPSAEHLVRTHINLIHKMQKFLPITDVAIEINRFAFLSLEDPSISGVDFQNGPLKGYDDLNVAIEDLQDGHCLMCNSPIEHRHHIVPRSMQGSNTIGNIAGLCCKCHERVHKDARFEDRLKKKKAGLNKRYAAVSALNQAIPFICKRLEQEFGKEHVHYCSGRDTSMVRRSLGYHKTKEEQLHEVDAWCIAVLSLQQIPEKAPSFDHVHEILQFRRQDRSRIKAQTSRAYYHEGKKIAKNRKKAEGQREDSLQEWRKQQVKRYVEEQTRKMISQLEIKKSIRRYNRLDRLMPGAVFYYQGIRYVMRGQHCEGTYLQAVGMGSKDFPAKKCKIVAHNEGLVFVS

SEQ ID NO: 23573 - protein, 468 aa, unidentified
LKENKARVVCTTPFTIQLNYDTPEITQDLILGIDPGRTNIGVAVVKEDGSCVFSAHLETRNKEVPLLMKKRAAFRRNHRTQDRRRKRQRRAIAAGTTVTEGSVERLLPGYEKPVVCRYIRNKEARFNNRSRPAGWLTPTANHLLRTHINLIAKVAKFLPITKVVVELNRFAFMAMDNPNIRRWEYQQGPLYGLGSVEDAVYAQQDGHCLFCKKPIDHYHHVIPRRKNGSETLANWCGLCAKHHDLVHKDKVWADKLVTRKEGVNKKYHALSVLNQIIPHLLEYLGDETLYDIYATNGRSTKGFRIAKNVPKEHYTDAYCIACSILDTDIKVSAPVEPFELKQFRRHDRQACIRQMVDRKYLLDGKVVAANRHKAIEQKSDSLAEFREACGAAVVSQLTVKPHPPQYKDMARIMPGAVMDFGGAVGILQGSEGFHNGKPDYYKSTKGERVLTRRCALLAQNAGTVFIPA

SEQ ID NO: 23574 - protein, 463 aa, unidentified; identical to SEQ ID NO: 18956

SEQ ID NO: 23575 - protein, 423 aa, unidentified; identical to SEQ ID NO: 3951

SEQ ID NO: 23576 - protein, 458 aa, unidentified
MLTYVLAKDGTRLMPTYNIRKVRRLLKSGRAVIVGHRPGLTIRLMYDLPEQEAPHVQPVEICEDTGYAHIGVSVKSEKHEFAHEQYDLLANEKQRRDDRRKYRSERRSRKRHRTPRFDNRTASKQPGWLAPSIENKMLRHADIIDRYAKVLPLTSVVLEMGSFDTQELEAIQTGAKLPEGTDYQRGKRYQISTLREAVFYRDGYACQVCGKSIKDHAVLRVHHAGYWHGDHTDRMGNLVTVCTKCHTAANHKPGGRLYEWRPKVKPMTGAAFMNSVRWKLYEEVKRRFPGIEIHVTYGSHTKVERRALCLPKTHANDAYVMGEFHPAHRAHEVKYQKRRRGTRVLQRFYDAKYIDSRDGTKKSGSQLSCGRTNRSESRHSGRDLRQYRQVKVFKGRFSVRRKRYPWQPEDAAYLDGRRYTVVGTISCGKSVLLDPHRTSVPKKLRLIRKAESWCISNG

SEQ ID NO: 23577 - protein, 307 aa, unidentified
VVDNRLLSIKPLINIGEGVIYSSICTGLSLQTYQKRKEVPCMVYVLDINGQPLMPTTRHGKVRRLLNSHLAKVVKRCPFTIQLLYQSTKEIQPVSLGVDAGSKHIGMAATTEKKVVYQEELSPRNDVVKLLSLRRASRSSRRSRKTRYRKPKFNNRVHSKHKGWLAPSVEVKIQEHITAIKRICQILPISEIQVETAEFDFQRLKAMKEWKPLPVGTDYQLGEQYDFYNTRQYVLHRDGYTCQCCGTHDNNIKLHVHHIESRQTGGDAPSNLITLCEHCHKALHKGKLELPKGKKRGKSYRDATFMG

SEQ ID NO: 23578 - protein, 431 aa, unidentified; identical to SEQ ID NO: 7729

SEQ ID NO: 23579 - protein, 418 aa, unidentified; identical to SEQ ID NO: 4934

SEQ ID NO: 23580 - protein, 422 aa, unidentified; identical to SEQ ID NO: 5457

SEQ ID NO: 23581 - protein, 460 aa, unidentified
MVAVVDLSGRPLMPTNEYRARKLLKQNKAKIFGYRPFTIQLTERKSTEIQPIELCMDTGYIHIGISAKSERHEYLGMQIDTLTDEKLKRDDKRQYRRQRRNRKRYRAPRFDNRRRKEGWITPSLEHKKEIHIDAIQRICKVMPITDITLEMGNFDTQVLKAVEEGKPLPQDSDYQHGERYGIATLREAVFLRDGYKCQCCEKSVKDGAILHVHHIKYRSQGGTNRMSNLITVCDKCHTPKNHKPGGKLWNWKPKLAEFKGASYMTSIRWMLYNEVTAMLPNSSVHITYGAKTKESRRKLDIKKSHVNDAYVMGLFCPKHRTKPVYFKKKRRNNRVLEKFYDAKYIDSRDGKKQSGQELFNGRISRNHRKDSENLHLYRKQKVTKGRRSIRNRHYPIQPHDILLYQKKKYETAGCHNNGSRAILLPEKKSVALKQLTMYQYAGGYYRVPYESNKKEERTGS

SEQ ID NO: 23582 - protein, 442 aa, Sutterella sp.
MSTTVFVLDKKHRPLMPCRPARARRLLRAGRARGVKRFPFVIRLVDRTVEQSEVQPVLIKLDPGSRETGAAVVRDDGKKRHHALAFFVIEHRGGAIRDALKARSAFRRRRRSQNLRCRSPRFLNRVKPKGWLPPSLRHRVETTLSFVRRMCRYLPVSGIATELVKFDSQKLQNPEVSGVEYQQGTLFEYEVREYLLEKFGRKCVYCGAEGVPLNIDHVVPRAKGGSNRVSNLVLACMSCNQKKGARSLEDFLKGMPKVLARVRRELKTLLRDAAAVNATRWVLFNELKATGLPVETGSGALTKLNRHAFGVEKEHWLDALCVGRLNGVVTRKGLNVLEIRCMGRGSRQRTRLTKYGFPRGYLMRQKCVHGFATGDMVEANVPKGKKAGLWRGRVAVRVSGSFNIQTPKGVIQGVGWKHCRLISHNDGYGYAWLGHAPHSSPA

SEQ ID NO: 23583 - protein, 560 aa, unidentified
MANDYVFVVDRKGNPLIPTKRRGRVRHLLKEGKAVVIKTHPFTVKIKYDVGHYTQPMYEGIDSGRQNIGNAVSRENGENVLLEDVRTNNKSIKKNLMKRKVHRQERRRNNRHSRQRKAIHDGTEIKNGDDDKWHTDKDCKSVKVSYPAADNAVTHKVIRGKEGKFANRKRPDGWITPSARQIVQLTLNMVKETCSIMPIRRISFERVAFDFQKLANQNIHAWEYGKGPLYGFKTYKDCIYAEQKGKCPFCGKPITQYHHIIPRSAGGIDNVKNIIGLCDEHHTMVHNDAAFAETLSDAKAGVEQEYYAGLLNSAVPALIEALSVYCKEKSIELLITDGRTTRETRVKYGFDDKKDHCIDAYAISLADRNVKNISFAGRIIMKRRYKKKSKNIISARNQRIYVLDGQVIACNRHKAENQKENSLEEFLTQYRETHTEKKVQQMMHHIRILPAVRSYTFHKDGLKAICHPGDIVEYKKLNKTSGRMKRNIFVCTSVNFDGKDKYGNYCAAENHIGYDNGKGNGNRKAKFCTVLDSGCLQCTGIKRTDDYIAQLKADPSKKKG

SEQ ID NO: 23584 - protein, 451 aa, unidentified
  REGION 1..451: note = IscB polypeptide
MQKLQVEFKNVPRNTSLVPCSTNLVLNRDESLSVQDKVLACNNPEVNLARRSGHSFLVFILNKNGKPLMPCSFKKSKQLVREGKALVIKRSPFTIQMNYGSTGYRQKINLGIDSGYENIGFSARTDKEELISGTVKLDGRTKERLDEKRMYRRGRRNKLWYREPRWLNRTKPEGWLPPSIERRYQTHLILIERIKKLIPISKVIIEIAKFDIQKLENPDIKGKEYQQGSLYEYQNVRSYLMSREKGLCEYCKKDFKNSSSHIHHRKPRNKNGNNRLGNLMLLHRDCHKEIHKKPELLKKYEKTSVKSYKQSTFMSIINKRFFNDIKDLEVTYGNITFVNRNKLGLIKTHYNDAFVISGGITQKRIKPFKVTQKHRNNRVLQMNRKGFKPSIKRNRSIIAPLDLFWVNKIKYSCRGMYNKGKYILYGDVKKKEYFKMNSVEKYFNNGSLVWS

SEQ ID NO: 23585 - protein, 438 aa, unidentified
MVLVIDKRKQPCNAISEAYARILLRSKQAVIHRRYPFTIRLKNNNAVKKTALYVVKIDPGANVTGISIVDSEDKVIMLAELVHRGKTIKRNLDSRRAVRKSRRQRKTRYRQARFRNRTRPQGWLAPSVKSRADNVINFVRKLKRFLNINKVEIERVSFDAAQMSSDTKLYGVDYQQGALYQTELKSYLFKKHNGRCVYCGSKAAEIEHVIPKSEGGTDSVHNLVIACRKCNELKGKLSLKEFGKLMNKDFSHLESKELPKHAAIVQSARNYMFKEIAKIVPNIVGFDAWLTKYNREELNLPKQHYYDALSVGEIKDYKFLTDKVLIISAKGRGSRQMCLMDRFGFPRTSAKASKSVKGFQTGDIVKAVVPTGLKQGEYLGRVAVRASGSFNIETNKETIQGIGYRYCRIIQRSDGYLYDYKERDFLSAMNCRVSVASF

SEQ ID NO: 23586 - protein, 431 aa, unidentified
MPDKVYVISRLGHPLMPCSPAKARHLLDDKKAKVVKRMPFTIRLLYGSTKYIQPIILGVDAGSKTIGLSASTAKEEVFAAEVMPRNDVVENLSTRREFRRARRNRTTRYRKPRSDNRVRSNHERWLAPSVKVKIQEHITSIKRVCTILPISKVVIETAEFDLQLLKAIQEGKPIPEGEDYQKGEMYGSYNVCQYVLWRDNYTCICCGVRGTPNNPVRLHVHHFESRKYGGNAPDNHGTLCDDCHKKFHLGIITDVKLKTRRRQSTRDAAFMGIMRKTLMWRLRTELFIPVAETKGYITKATSEKLLVLPKSHTRDALAIAQGRHGFSIKEYAYVEPANHIYTVRPVRHHNRQLHKASILKGGIRKRNQASKYVFGFRLYDKVLYQEKACFVWGRRTSGTFLLRTIDGIKVKDGVSYRNLTLLERSSNYLIA

SEQ ID NO: 23587 - protein, 476 aa, unidentified
VMLASFFWWHSRMFLVLDSAEPAPSLRKHFICCAQAYHRCRDTVISAILHSYKKGNNMSEYIYVLGMDGRPQMPTRRKRHIDRLLSTGKAKVVEYVPFTVQLLYENHPVLQPVILAEDPGRTNIGVAAVSQKGELLFSAVVETRNKEITKFMEKRRKARQRLAKRCHTMIKAGQVMRKLPMFGEEKYITCRYIRNTESRFYNRRRKDGWLTPSAEQLVRTHINLVHRIQGFLPVTDVALEVNRFAFMQLEDPYITGVDFQNGPLKGYDDRKAAVYDQQDGQCLLCNKKPIEHYHHIVPVAKRGSDTLANIAGLCCRCHEKVHKDAGAARRLQNKKQGLTKKYGALSVLNQAIPFICKRLEEEFGEHVHYCSGRDTSRLRQSFGFHKTKDEPLHEVDAWCIGVLSLREIPEKCPDFTKVYQIKQFRRQNRRRINHQTERRYYLDGKLVAVNRKKRMGQTGRKDNQTKDSLADWFTKM

SEQ ID NO: 23588 - protein, 470 aa, unidentified; identical to SEQ ID NO: 2825

SEQ ID NO: 23589 - protein, 421 aa, unidentified; identical to SEQ ID NO: 4289

SEQ ID NO: 23590 - protein, 509 aa, unidentified; identical to SEQ ID NO: 5057

SEQ ID NO: 23591 - protein, 422 aa, unidentified; identical to SEQ ID NO: 13422

SEQ ID NO: 23592 - protein, 472 aa, unidentified; identical to SEQ ID NO: 19299

SEQ ID NO: 23593 - protein, 439 aa, unidentified
MKVWVLHQDGQPLMPTTPRTARRLLEAGQARIVARTPFTIQLLYPSRHSTQPITLGIDAGYATVGFSAVSEQAELVGGELKLLEGMSARLSERAMYRGGRRRRTRHRPPRFDNRRRAEGWLAPSIQHKLDSHLRLIDRLCAALPITRIVIEVASFDIQRLKNPAIAGEGYQQGEQASFWNLREYILHRDGHTCQNPTCANRAKEKVLQVHHLGYWRGDGSDRPANLITLCTRCHTSENHQPGGFLWGWQPALKSFRPETFMSLVRWRLVAAVGAEATYGYLTKSRRIELELPKSHANDAFVMAGGSTQARTDPLLLDQVRRNRRALQLWYDAKYIDIRTGEVVKAQVLNNGRRTRNRTLNGENQRRHRGPKVSKGRVSIRRRRYPYQPGDLVRYEGQVYRVQGMGGYGRNLKLAGRPKEIKAALVTPVRWRKGICQQVP

SEQ ID NO: 23594 - protein, 416 aa, unidentified
MVYVLSQNGQPLMPTENHAKVRALLKHGKAKVIQRCPFTIQLLYESTTHTQKINLGIDAGSKTIGVSATTDSKVLYESEVVLRNDIVELISGRRALRSSRRNRKTRYRKPRFDNRKRPDGWLAPSVRQKIETHITVVENVMKILPVTKIIVETASFDIQKIKNPEIEGVGYQHGEQLDFWNVKEYVLFRDGHTCQCCKGKSKDNILNVHHIESRKTGGNAPNNLITLCETCHKAYHKGIITLPKEIHRGMRFRDAAFMGVMRWAFYDRLKELYNLLGVEVINTYGYITKNTRITYDLPKEHYVDARCISGNPAAKPMDYYYLQKKVRCHNRQIHKNTILKGGIRKRNQASYEVKGFRLYDQVLWKGQKCFIFARRSTGRMDLRLLDGTHVNASVGYKNLKLLSMRKNYLIEQRKAG

SEQ ID NO: 23595 - protein, 462 aa, unidentified; identical to SEQ ID NO: 2823

SEQ ID NO: 23596 - protein, 466 aa, unidentified
LSRQTLPRKREALSRAHRSYSMSFVFVLDTNKQPLNSVHPGRARLLLKTGKAAVLKRYPFTLILKTVVEQPQVQPLRLKIDPGSRTTGIALVDDQSGQVLFAAELTHRGQEIKKALDNRRGVRRRRRARHTRYRQPRFHNRRRPKGWLAPSLMSRVENVMAWVNRLRKLCPMTAISMELVRFDLQKMDNPQIAGVEYQQGTLAGYECREYLLEKWGRACCYCGKQHNPLEVEHMVARANGGTHRVSNLCLACEPCNKCKGTQDITVFLKHQPDVPKRLQAQAKAPLKDATAVNATRWVLFERLKETGLPIECGSGGLTKYNRSTRTLPKTHWVDAACVGHSTPPVLQMSQVRPLLITAEGHGSRQMCLMNDLGFPRTKPKAKHFPHQFRTGDIVKAVVPAHLKSPGVHTGRMSAKAKGGFTISTNKGKVTDIGKKYCRILQKADGYGYAQGSAPAGAFLSSLSLKA

SEQ ID NO: 23597 - protein, 406 aa, unidentified
MVYVQDIYGRPLMPTTRHGKVRRLLKSKKATVVNLCPFTIRLLYDTTGYKQEITLGVDTGTKHVGLSATTKSKELYASEVILRSDVVDLLSTRRELRKIRRYRLRYRKPRFMNRIKSKKRGWIAPSIRQKIDPHIRIIGFVYSILPVSKLIIEVAQFDTQKIKNPEISGKEYQEGEQLGFWNVREYVLARDEHKCQHCKGKSKDPVLNVHHIESRKTGGDSPSNLITLCKTCHKEFHKGNIKLKVNRGESLRDAAVMSIMKWELYDELKSLYPNVKMTFGYITKYNRINHGIEKSHVSDAFVISRNFDSERLGYYYKRKLVRRHNRQIHKMKAPKGGNKRMNQSPFKVFGFRLFDKVMFQGKERFIYARRLRGIFNIRDINGENKKDISYKKLEYVSHGLISIVAG

SEQ ID NO: 23598 - protein, 419 aa, unidentified; identical to SEQ ID NO: 12986

SEQ ID NO: 23599 - protein, 476 aa, unidentified; identical to SEQ ID NO: 3164

SEQ ID NO: 23600 - protein, 413 aa, unidentified; identical to SEQ ID NO: 7841

SEQ ID NO: 23601 - protein, 429 aa, unidentified; identical to SEQ ID NO: 20788

SEQ ID NO: 23602 - protein, 457 aa, unidentified; identical to SEQ ID NO: 5177

SEQ ID NO: 23603 - protein, 449 aa, Scytonema sp.; identical to SEQ ID NO: 3592

SEQ ID NO: 23604 - protein, 357 aa, unidentified
LLKLAQAAVYLRYPFTIILKYAVSHPKKQPTQLKIDPGSKTTGLAINRGDQVIWGAELTHRGQQIKNDLESRRALRRNRRNRKTRYRKARFLNRTRKPGWLPPSLESRVKNIVTWVNRICRYVPITGISQELVKFDLLAMQNPEISGKEYQQGELAGYEVREYLLQKWGRKCAYCGIENLPFEVEHIHPKSKGGSDRVSNLTLACRGCNLAKGNQDIRDFLSKKPDILSRILKQASQPLKDATAVNSTRWALFQQLKQTGLPIEVSTGGRTKYNRTRLELPKTHWLDAACVGNVEVLQVFTDQPLLIAAKGWGSRQMCTTNKYGFPVKHRTRCKTFFGFGTGDMVSACRHSRRQADR

SEQ ID NO: 23605 - protein, 396 aa, unidentified
VVRRTPFTIQLTIATGESKQPVSLGVDAGYKHVGLSASTEKAELYASEVELRKDITDLLSARRALRQSRRNRKTRYRAPRFDNRIRTKRKGWLAPSVENRINAHLSRIKAVLRLLPITKITVETASFDMQRLKNPDISGKEYQEGEQLGFWNVREYVLFRDGHVCRHCHGRSKDPVLNVHHLESRRTGSDSPDNLITLCVTCHKALHRGEITLKAKRGQSFRAQAFMGIMRREVLNRLKASYPELKVHETYGYLTKHARIANGIVKSHGADAFCIAGNLGAERLGEFFFQKQTRRNNRQIHKLSILKGGIRKRNQAPFEAKGFRLFDKVACQGEEGFIFGRRSSGYFDVRKLDGTRISAGISHKKLRLLEKRRTYLTEIRKEEALPPLPEGRGLRA

SEQ ID NO: 23606 - protein, 412 aa, unidentified
MTNYAFVLDANGKQLAPTKEQKAWFLIRKKRATLVSKYPMVIQLKKEIPDEQIYKDEICCGIDDGGLHVGISLVQKCKTKNKVVFKGTIEQRKDVKHLMEVRKGYRRYHRFHKRYRQARFNNRKSSKRKERIAPSILQKRQATIRVINQLNKWINITNYWLEDVAIDIRALTDGYKAYRWQYQQSNRLDENIRKAVILRDGCKCMECGKSNCKLEVHHIKPRRSNGSNTLGNLISLCKKCHQKTEEQEEVYMNRYFSMLNSSDNKNLNYAQHVMIGKKWLREQLSKLGTLTLATGGDTANKRIDWNIEKSHSNDAICIAGLQPDTCNVKEWTIKPMRRQSKAKTDNVLGINHRDLVEYTFRNGETHRGYVTALYPGQNAINFQSSTKHCKKVNAKKCKLIWKYSKIYWLANV

SEQ ID NO: 23607 - protein, 507 aa, unidentified; identical to SEQ ID NO: 21871

SEQ ID NO: 23608 - protein, 435 aa, Sutterella sp.
MSTTVFVLDKKHRPLMPCRPARARRLLRAGRARVVKRFPFVIRLVDRTVEQSEVQPVLIKLDPGSRETGAAVVRDDGKKRHHALAFFVIEHRGGAIRDALKARSAFRRRRRSQNLRCRSPRFLNRVKPKGWLPPSLRHRVETTLSFVRRMCRYLPVSGIATELVKFDSQKLQNPEVSGVEYQQGTLFEYEVREYLLEKFGRKCVYCGAEGVPLNIDHVVPRAKGGSNRVSNLVLACMSCNQKKGARSLEDFLKGKPKVLARVRRELKTPLRDAAAVNATRWVLFNELKATGLPVETGSGALTKLNRHAFGVEKEHWLDALCVGRLNGVVTRKGLNVLEIRCMGRGSRQRTRLTKYGFPRGYLMRQKCVHGFATGDMVEANVPKGKKAGLWRGRVAVRVSGSFNIQTPKGVIQGVGWKHCRLISHNDGYGYAWLGH

SEQ ID NO: 23609 - protein, 431 aa, unidentified
MDAWDIIVVLNKRGKPLMPCSPAKARLLLKEKKAIVKRRTPFTIQLTIATGESKQPVTLGVDAGYKHVGLSASTEKAELYASEVELRQDVSDLLSARRALRQSRRNRKTRYRAPRFDNRIRTKRKGWLAPSVENRINAHLSRIEAVLRLLPVTKISVETASFDMQLLKNPDIAGKEYPEGEQLGFWNVREYVLFRDRHVCQHCYGRSKDPVLNVHHLESRRTGGDSPGNLITLCETCHKALHRGDITLKAKRGKSFRAEAFMGIMRWEVHNRLRALHPGIEVSNTYGYRTKHARIANGIAKSHCADAFCIAGNLGAERLCEFFFQKQTRRNNRQIHKLSILKGGIRKRNQAPFEVKGFRLFDKVACQGEEGFIFGRRSSGFFDVRKLDGTRISAGISYKKLHLLEKRRTYLTEIRKEEALPPLPEGRGLRA

SEQ ID NO: 23610 - protein, 557 aa, unidentified; identical to SEQ ID NO: 10483

SEQ ID NO: 23611 - protein, 451 aa, unidentified
VTTILKTCFAAFNLAKVVVLMDAWDIIVVLNKRGKPLMPCSPAKARLLLKEKKAIVVRRTPFTIQLTIATGETKQPVSLGVDAGYKHVGLSASTEKAELYASEVELRQDVSDLLSARRALRQCRRNRKTRYRAPRFNNRLRTKRKGWLAPSVENRINAHLSRIEAVLRLLPVTKITVETASFDLQLLKNPDIAGKEYQEGEQLGFWNVREYVLFRDGHVCQHCHGRSKDPVLNVHHLESRRTGGDSPGNLVTLCETCHKALHRGEITLKAKRGQSFRAEAFMGIMRWEVLNRLKASHPELEVNNTYGYRTKHARIANDIAKSHCADAFCIAGNLGAERLGEFFFQKQTRRNNRQIHKLFILKGGIRKRNQAPFEVKGFRLFDKVACKGEEGFIFGRRSSGFFDVRKLDGTRISAGLSCKKLHLLEKRRTYLTEIRKEEVLPPLPEGRGLRA

SEQ ID NO: 23612 - protein, 413 aa, unidentified
MTSYSFVLDANGKQLAPTKEPKAWFLIRKKRAALVSKYPMVIQLKKKIQENEICKDEIRCGIDDGGLHVGIALVQKCKSKNKVVFKGTIEQRNDVKHLMEVRRNYRRYHRYHKRYRQARFDNRKSSKREGRIAPSILQKRQATIRVIHWLNKWINITNYWLEDVSVDIRALTDGYQSYRWQYQKSNRLDENIRKAAILRDGGKCMECGKSNCRLEVHHIKPKRRNGSNTLDNLITLCESCHQKTEGQEELYMDRYFSLLKSSDNKNLNYAQHVMIGKMWLRKQLSGLGVLYLTSGGDTANKRIDWNIEKSHTNDAVCITDLQPDTCDIKEWAIKPMRRQSKAKTDHVLGIHHRDLVEYTFKNGETHRGYVTALYPEQKAINFQSPTKHCKKVNARKCKLLWKYSKIYWFENAS

SEQ ID NO: 23613 - protein, 414 aa, Phocaeicola sp.
MPCSPAKARLLLKEKKAIVKRRTPFTIQLTIATGETKQPVSLGVDAGYKHVGLSASTEKAELYASEVELRQDITDLLSARRALRQSRRNRKTRYRAPRFDNRIRTKRKGWLAPSVENRINAHLSRIEAVLRLLPVTKITVETASFDMQLLKNPDISGKEYQEGEQLGFWNIREYVLCRDGHVCQHCYGRSKDPVLNVHHLESRRTGGDSPGNLITLCETCHKALHRGEITLKAKRGQSFRAEAFMGIMRSEVQNRLKASHPELEVNNTYGYRTKHARISNGIAKSHCADAFCIAGNLGAERLGEFFFQKQTRRNNRQIHKLSILKGGIRKRNQAPFEVKGFRLFDKVACQGEEGFIFGRRSSGYFDVRKLDGTHISAGISYKKLRLLEKRQTYLTEIRKEEALPPLPEGRGLRA

SEQ ID NO: 23614 - protein, 416 aa, unidentified
MVYVLDKNGQPLMPTDRHRKVRLMLQSGQAKVIKRCPFTIQLNYDSGHQTQEISLGIDAGSKHIGVSATTKIKVLYEADVELRNDIVNLLSSRRELRRGRRNRKTRYRQAKFNNRRRGNGWLAPSIRQKIGTHLTVVKNICKILPISRIMVETASFDIQKIKNPDIQGAEYQQGDQLGFWNNREYVLFRDNHTCQCCKGKSKDKILNVHHIESRKTGGNAPNNLITLCEICHTGYHKGAIQLPKTVKRGMRFKDAAFMGIMRWAFYEALKQQYEPVGTPVHNTYGYITKHTRIAYNLPKEHYVDARCISGNPEASSNGEYYYQKKVRCHNRQIHKLTVLKGGIRKQNQATYLVKGYRLFDKVSYQGKGYFVFGRRQSGFFDIRTLSGEKVNKGSLSCKKLKFIATRTHYLTERRAV

SEQ ID NO: 23615 - protein, 512 aa, unidentified
MSTVYVLNKDGKPLMPTTRGGHVRHLLKEQKARVVRTNPFTIQLLYETDNLVQPLYLGIDPGRTNIGVAVVKTDGTAVFTAHLETRNKEIPKLMQGRKKARRARRTNGRRCRRQRRAKANGTISKKCVKQATAQNGSVSKRANEIGVIKRHLPGCEKEVLCIGIKNKEAKFSNRTRPEGWLTPTANQLLQTHINLVKKIQKFLPISDVVLEINKFAFMRLDNPNVQKWQYQQGPLYQKASLEEAVSEMQEHHCLFCKNTIDHYHHVVPQSENGSNTIGNIVGLCTKHHDLVHKDTSWQEKLAKKKTGLNKRYGALSVLNQIIPALTKELSSLFPKHFFATNGKSTYDYRAAHGVSKDHWLDAYCIASSVLPNDACDNNINNHVPYELKQFRRHDRRALHKENMGRVYTLNGKSVATNRHKATEQTTDSLEEFRQCQPDDVCKLKVKEHHPEYRNPKRNFPGCVFLVGKHTHVIQGTSGSHNGKADGYYDTNGNSYSSGKCKFVAKNEGIVFT

SEQ ID NO: 23616 - protein, 461 aa, unidentified; identical to SEQ ID NO: 22444

SEQ ID NO: 23617 - protein, 412 aa, unidentified
MPCSPAKARLLLKEKKAIVKRRTPFTIQLTIATGETKQPVSLGVDAGYKHVGLSASTEKAELYASEVELRQDITDLLSARRALRQSRRNRKTRYRAPRFDNRIRTKRKGWLAPSVENRINAHLSRIEAVLRLLPVTKITVETASFDLQLLKNPDISGKEYQEGEQLGFWNIREYVLCRDGHVCQHCYGRSKDPVLNVHHLESRRTGGDSPGNLITLCETCHKALHRGEITLKAKRGQSFRAEAFMGIMRWEVHNRLRALHPGIEVSNTYGYRTKHARIANGIAKSHCADAFAGNLGAERLCEFFFQKQTRRNNRQIHKLSILKGGIRKRNQAPFEVKGFRLFDKVACKGEEGFIFGRRSSGFFDVRKLDGTRISAGISCKKLHLLEKRRTYLTEIRKEEALPPLPEGRGLRA

SEQ ID NO: 23618 - protein, 195 aa, unidentified
RTLCDDCHKKFHLGIITDVKLKTRRRQSTRDAAFMGIMRKTLMWRLRTELFIPVAETKGYITKATREKLLVLPKSHTRDALAIAQGRHGFGIKEYAYVEPANHIYTVRPVRHHNRQLHKASILKGGIRKRNQASKYVFGFRLYDKVLYQGKACFVWGRRTSGTFLLRTIDGIKVKDGVSYRNLTLLERSSNYLIA

SEQ ID NO: 23619 - protein, 451 aa, Aphanothece sp.; identical to SEQ ID NO: 6675

SEQ ID NO: 23620 - protein, 464 aa, unidentified; identical to SEQ ID NO: 6574

SEQ ID NO: 23621 - protein, 460 aa, unidentified
  REGION 1..460: note = IscB polypeptide
MQKFKEKLKNTPTNAQLVCSSVNSQLNKDENPSVESMVLSLNNSEVDQFVLKEQKQDLRVPVVYVLNMRGKPLMPTNCRKAKKLLKTGKAKVIKRIPFTIQLKYPTGEAKQNITLGIDIGYSNIGFSAISEKQELISGTVVLENKMVKRLEEKSMYRRGRRNKLWYRKPRFLNRVSTKKEGWIPPSIERRFQTHISLIERIKKLLPISKLRIEVAKFDIQKLENPNIEGEGYKKGNLYNYRNRIAYLIAREKGNCQFCGKPYKKGDGWRLHHIFGKEKDRSQDWALLHESCHIELHQKHLEDVLRKQKSKSYKESTFMNIIRWKFRETFPEAEITFGNITFQDRVELNLEKSHVNDAFIIAKGKNQSRGFEYTIEQKQKNNRCLQLNRKGFKPSIRKQRYLHQPQDLIKVNSRIFKVKGIHSYGKQIMLKDLLGNILNKAVKKLDEYHFYQGTLKWRICG

SEQ ID NO: 23622 - protein, 442 aa, Lactobacillus sp.; identical to SEQ ID NO: 4322

SEQ ID NO: 23623 - protein, 502 aa, unidentified; identical to SEQ ID NO: 2616

SEQ ID NO: 23624 - protein, 436 aa, unidentified; identical to SEQ ID NO: 22457

SEQ ID NO: 23625 - protein, 512 aa, unidentified
MSTVYVLNKDGKPLMPTTRGGHVRHLLKEQKARVVRTNPFTIQLLYETDNLVQPLYLGIDPGRTNIGVAVVKTDGTAVFTAHLETRNKEIPKLMQGRKKARRARRTNGRRCRRQRRAKANGTISKKCVKQATAQNGSVSKRANEIGVIKRHLPGCEKEVLCIGIKNKEAKFSNRTRPEGWLTPTANQLLQTHINLVKKIQKFLPISDVVLEINKFAFMRLDNPNVQKWQYQQGPLYQKASLEEAVSEMQEHHCLFCKNTIDHYHHVVPQSENGSNTIGNIVGLCTKHHDLVHKDTSWQEKLAKKKTGLNKRYGALSVLNQIIPALTKELSSLFPKHFFATNGKSTYDYRAAHGVSKDHWLDAYCIAGSVLPNDACDNNINNHVPYELKQFRRHDRRALHKENMGRVYTLNGKSVATNRHKAIKQTTDSLEEFRQRQPNDVCKLKVKEHHPEYRNPKRNFLGCVFLVGKHTHVMQGTSGSHNGKADGYYDTNGNSYSSGKCKFVVKNEGIVFT

SEQ ID NO: 23626 - protein, 453 aa, unidentified
MYVAVIGSTGKKLQPTSSYRARKLLNSKRAKICSYRPIFTIRLLDREDGKTQPIELKMDTGYQYIGVSICSEKHEYVNHQYDMLPDEAERHNDCRKYRRTRRNKKRYRKARWNNRKSNLVTKGKYAPSIRHKKDIHVDLYKRFQKVIPITTVVIEAGQFDTQVLKAVEEGNPLPQGTDYQQGERYGFATLKEAVLSRDNYQCICCGKGIKESKILSVHHLGYRKGDRSNRMSNLATVCTDCHTSKNHQPGGKLYDLKPQLKNFKGATFMSTVRWDMVNEFKNINPTVKIIVTYGAMTKLKRADLNIKKTHSNDAYAMGNFHPKHRTDFEHYQKCRRNNRILCKFYDAKYTDVRDNSIKTGKQIGCNRTNRRELRNSDKNERIYRGHKLKKGRNSIRQQHYSYRPGDIILYQGQKFTVAGINNKGKTVTLKEIKKVPSVKKVQLVKHVGGWRQI

SEQ ID NO: 23627 - protein, 476 aa, unidentified
LAASGTEGVSHPGLPGKYKHKGGQLMSVAVISKTGERLMPTSEYRARKLLKSGKAIKHSYHPFTIQLTERETGDIQPIELCMDTGYIHIGISVKSEKHEYLAEQIDTLTDERGRHDACRMYRRQRRSRKRYRQARFNNRKRDQGWIAPSLEHKKKIHIQAISRINNVMPITDITLEMGNFDTQVLKAKEEGKPLPQGADYQHGERYGIATLREAVFSRDGYKCQCCGRTIKDGAILHIHHIKYRSQGGTNSMSNLATVCDKCHTPKNHKPGGKLYNWKPKLSSFKGATFMTAIRWQLYNEVKALFPDIDIHITYGAATKERRRKLDIDKSHVNDAFVMGQFHPKHRIKAILCKKKRRNNRCLEKFYDAKYIDSRDGKKRSGQELFNGRINRNHKKDSENLHQYRLQKVTAGKRTVRKQHYKIQPHDIVIYENRKRETAGCHCNGTRMMLLPDKKSASIKKVKIYKYAGGYFKSAFN

SEQ ID NO: 23628 - protein, 416 aa, unidentified; identical to SEQ ID NO: 12821

SEQ ID NO: 23629 - protein, 291 aa, unidentified
LSRIEAVLRLLPVTKITVETASFDMQLLKNPDIAGKEYQEGEQLGFWNVREYVLFRDGHVCHHCYGRSKDPVLNVHHLESRRTGGDSPGNLITLCETCHKALHRGEITLKAKRGQSFRAEAFMGIMRWEVLNRLKASHPELEVNNTYGYRTKHARIANDIAKSHCADAFCIAGNLGAERLGEFFFQKQTRRNNRQIHKLSILKGGRRKRNQASFEVKGFRLFDKVACKGEESFIFSRRSSGYFDVRKLDGTRISAGISYKKLRLLEKRRTYLTEIRKEAFPPLPEGRSLRA

SEQ ID NO: 23630 - protein, 465 aa, unidentified; identical to SEQ ID NO: 3603

SEQ ID NO: 23631 - protein, 431 aa, unidentified; identical to SEQ ID NO: 15055

SEQ ID NO: 23632 - protein, 396 aa, unidentified
LTYETTKYTQPITLGIDAGYQSIGFSAITEKKELLAGECQLLQGQVERNRERLMYRRQRRNRLRYRKSRFDNRRKPEGWLAPSLQNKLDTHIRLVEKIKSILPITQVIVEVANFDIQAIKNPGIQGVAYQQGEQYNFWNLREYILHRDNHECQNPGCKNRSKNQELQVHHIGYWKEDYTDRPGNLITLCDKCHRPENHREGKFLWGWQPKVKSFRAETFMSTIRWKLVRTLGCEYTYGYITKSRRIELKLEKSHVNDAFVIAGGTNQSRTIPITIQQVRRNNRSLQKFYDAKYIDLRTGEKASGQELNCGRRTRNKNLNTENLRKYRGKKLSPGRVNIRKQRYPYQPGDTVLYEGQKCTVKGVQNLGIYIKLSELSKPVKTSEVSILYYGKGLRVW

SEQ ID NO: 23633 - protein, 406 aa, unidentified
LLKEKKAIVKRRTPFTIQLTIATGETKQPVSLGVDAGYKHVGLSASTEKAELYASEVELRQDITDLLSARRALRQSRRNRKTRYRAPRFNNRLCTKRKGWLAPSVENRINAHLSRIKAVLRLLPVTKITVETASFDLQLLKNPDISGKEYQEGEQLGFWNIREYVLCRDGHVCQHCYGRSKDPVLNVHHLESRRTGGDSPGNLITLCETCHKALHRGEITLKAKRGQSFRAEAFMGIMRSEVPNRLKASHPELEVNNTYGYRTKHARIANDIAKSHCADAFCIAGNLGAERLGEFFFQKQTRRNNRQIHKLSILKGGIRKRNQAPFEVKGFRLFDKVACQGEEGFIFGRRSTGFFDVRKLDGTCISAGISYKKLHLLEKRRTYLTEIRKEEALPPLPEGRGLRAKM

SEQ ID NO: 23634 - protein, 335 aa, unidentified
VQTHLNIIRKISRYLPVTDIAFEVNRFAFMHMENPKAMGVDFQNGPLKGYDDVKEAICTQQHGKCLMCKKPIAHFHHIVPRSRGGSDTIQNLAGLCPECHTKVHTDTTFRKDFDRKKSGQLKKYGALSALNQAVPFICKKLLEEYGEEHVHFCGGLDTSLIRTALGFEKTKKNQMHEVDAYCIGLAALEINEVETPAFDHTFQIRQFRRQDRSIIHHQTGRSYYQGKEKVAQNRKPGFEQKTTALSQWYEEQVRIHGEKEAEKLRSQLRVEKSSRHYNDMDRFLPGAVFLYEGKRYVLSGRITNGKYLRACGQGMKNFPAAECTFIRHNAGLVFI

SEQ ID NO: 23635 - protein, 477 aa, unidentified; identical to SEQ ID NO: 10137

SEQ ID NO: 23636 - protein, 421 aa, unidentified; identical to SEQ ID NO: 5881

SEQ ID NO: 23637 - protein, 423 aa, Moorena sp.; identical to SEQ ID NO: 14011

SEQ ID NO: 23638 - protein, 477 aa, Blautia sp.; identical to SEQ ID NO: 2707

SEQ ID NO: 23639 - protein, 452 aa, unidentified; identical to SEQ ID NO: 13319

SEQ ID NO: 23640 - protein, 461 aa, unidentified
  source 1..461: note = uncultured beta proteobacterium
LMPCSENRARKLLDSGRARVHKLFPFCIRLTDRLIEDSALQPMRLSLDPGSKETGLAVSRIAETIDVRTGEIAPVMHICFLIELVHRGAAIKKSLEARAAMRGRRRSANLRYRAPRFGNRPRAKGWLAPSLKHRVDTTCSWVRRLTCLAPITHLAKELVRFDMQLMQNPEICGVEYQQGSLQGYEVREYLLEKFHRTCAYCDAKDIPLQMEHIHPKANGGSNRVSNLTLACGPCNSKKAARDIKDFLAKDSVRLKRILAQAKAPLRDAAAVNSTRWALFNALKATGLAVETGTGGQTKWNRSRLGIVKTHALDAACVGTVYDVQGVNAPALRVTCTGRGSRCKTRLDQYGFPRTYLSKQKTAFGFKTGDMVIANVTKGIKTGVHKGRLAIRLSGSFNVQSGLKGIPAVQGISYKYCRITQRADGYGYSQPEQPKKGRRDQGRASHAALYLPGLNAQVSRAF

SEQ ID NO: 23641 - protein, 413 aa, unidentified; identical to SEQ ID NO: 3220

SEQ ID NO: 23642 - protein, 406 aa, unidentified; identical to SEQ ID NO: 6031

SEQ ID NO: 23643 - protein, 428 aa, unidentified
LKVFVLNMRGQPLMPCSPAKARHLLKAGKAVVKRRTPFTIQLRIATGETKQNVTLGVDAGAKHVGLSATTEKEEVFASEVELRQDITGLLAARLSLRRDRRHRKTRYRAPRFLNRVRSKHKGWLAPSVENRIQAHMSRIDAVCRLLPVTKIVIETASFDIQKIKDPSVEGTDYQQGDQLGFWNVREYVLFRDGHVCQHCHGYSKDKILNVHHLESRQTGGDAPNNLITLCETCHKACHAGKIKLKVKRGQSFREEAFMGIMRWTLLDRVRKAHPGLPVENTYGYLTKNTRITLGLPKAHCVDAYCIAGNLKAVRRGVYLHQRQVRKHNRQIHKCTVLSKTLKDGTKIGYRKLNQTPHLVKSFRLFDKVRCLGQIGFIFGRRSSGYFDVRRLDGVKLSPSISWRKLTLLEKRSTYLTELRKQDGASSPV

SEQ ID NO: 23644 - protein, 430 aa, Pseudoalteromonas sp.; identical to SEQ ID NO: 8414

SEQ ID NO: 23645 - protein, 431 aa, unidentified
MPNKVYVINKHGRPLMPCSPAKARHLLDAGKAKVKKRTPFTIQLVYGSSGYTQEVILGVDAGSKTIGMSASTTKEELLSAEVKPRNDVVDLLSTRREFRRARRNRKTRYRKPRFDNRVRSKHRGWLAPSVEVKIQEHITSIKRVCRILPVSKVVVETAEFDLQLLKAIADGKPVPQGEDYQKGEMYGHYNVRQYVLWRDGYTCKCCGAHTTKKKEVRLHVHHLESRKVGGDAPDNQVTLCESCHEKLHKGLIAEKDFKKRKRRSTRDATFMGIMRKTLMQRLCSELPIPVVETRGYITKATREKLLVLPKSHTNDALAIAQGKQGFNVGYLPGIVQIDKICTIRPVRHHNRQLHKATILKGGIRKSNQAEKYVFGYRLFDKVQFNGQDCFIWGRRTTGIFTIKTINGKMIKDGISFKKLKLVEKSTSYLIA

SEQ ID NO: 23646 - protein, 425 aa, unidentified
  source 1..425: note = Firmicutes bacterium
MIINEEKQCKVYVLSKDNKPLMPTNGVKAAMLLKKNIAKVVRKTPFTIKLLFEPKTNYVQPLTLGVDLGSKFIGSAVKNEINDDVIYKSQVELRDNIKDNMDRRRAYRRARRNRKTRYRKPRFLNRASSKRNDRLNPTLKSKLDNHLKEIKFVSKILPIKNIILETTKFDIHKLKNPNVKGILYQKGDLYGWENARQYVLHRDEFKCQQCKGKSKQKKLDVYHIICKSEGGSDDVENLICVCLDCRYAIQNGEIKLKHQGKKKYSVDATQANIISSQLQKKLELEGIKFETTSGHITKVNRSELKLEKSHVNDAIGIVSRGKEVKDRLKVLYKRCIADGGYQREVCVKGLSKPRVYKVGKQRGFKTFDEVLYRGNKYFIKEINKEIYTYLMDVFGNKVDFVKPKMPKLENLKIINRRKTWIMQVA

SEQ ID NO: 23647 - protein, 418 aa, unidentified; identical to SEQ ID NO: 2425

SEQ ID NO: 23648 - protein, 382 aa, unidentified
LLYDSTHYTQDIVLGVDAGSKHIGLSATTETKELYASDVELRNDIVDLISTRRQNRRSRRNRKIRYRKARFQNRVSGKKNWLAPSIRQKVDTHMTVVSRVCMILPVTKIIVETASFDIQKIKDPDISGTGYQQGEQLDFWNVREYVLSRDGHTCQCCKGKSKDPVLNVHHIESRKTGGDAPNNLITLCETCHKSYHSGAVQLPKAIHRGMRFKDAAFMGIMRWAFYNKLKEVYEPQDIEVSMTFGYLTKNTRIRHYLPKEHYIDARCISGHPEAIPNNEVFYQKKVRCHNRQIHKNTILKGGVRKRNQAGYLVKGFRLFDKVAYEGREYFIFGRRQSGFFDLRDLSGCKVNKGSLSYRKIGFLEPRQYYLCERRVMDTQGCA

SEQ ID NO: 23649 - protein, 449 aa, unidentified
LATDNSPRFVGSRICFDRCENRNKEGGRTLVYVISKTGQPIMPTENHAKVRMLLKSGKAKVVKRTPFTIQLTGTSKTFTQEVTLGVDAGSKHVGLSASTAKKELFSAELRPRNDVVDLMSSRRALRRSRRNRTTRYRQARFNNRVHSKHKGWLAPSVEVKIWNHIQGIRFVAKLLPVKTIRVETAEFDLQRLKALEAGEPVPVGTDYQLGEMYGQYNVRQYVLHRDGYTCQCCGAHGTDKKPVKLHVHHLESRKTGGDSPDNLIALCEDCHIGYHAGTVALPTTKRRRKSTRDAAFMGIMRKTMLERLRNMFSETNICSTYGYITKYWREKKNIVKTHTSDAFVIAKNFDAERLDRFLLIVPKRQHNRQIHKCKINKGGTRKLNQTPKFVFGYQLFDRVMCMGQEGFVFARRSSGAFDIRKLNGEKIRASISYKKLKRLESRNTLLVSY

SEQ ID NO: 23650 - protein, 488 aa, unidentified; identical to SEQ ID NO: 9276

SEQ ID NO: 23651 - protein, 482 aa, unidentified
LVWNVQAPWDVYPSPTLCGLCLKVLRGRNGDADKKPIPTLTKDENRPSGRTTGLRAEQAEPAGIRKGDTLKVFVLNMRGKPLMPCSPAKARHMLKAGKAVVVRRTPFTIKLTIATGETKQDVTLGVDAGARHVGISATTEKEEVFASEVALRQDITGLLADRLAFRRARRNRKTRYRAPRFNNRVRSKHKGWLAPSVENRIQAHISRIEAVCRLLPVTKIVIETASFDIQKIRNPEVEGTGYQQGDQLGFWNVREYVLFRDGHICQHCRGRSKDPILNVHHLESRKTGGDAPNNLITLCETCHKAYHAGKIKLKVKRGQSFRAEAFMGIMRWTLLDRVRKTHPKLPVENTYGYLTKHKRIALGLPKTHCADAFCIAGNLKALRRGDFLFQQQTRKHNRQIHKCSILKGGVRKLNQAPFLVKGFRLFDKVRIGGQIGFVFGRRVRGTFNIRRLDKTVIGTDINCKKLSLLETRKTFLTELRKE

SEQ ID NO: 23652 - protein, 438 aa, Lactobacillus sp.; identical to SEQ ID NO: 4646

SEQ ID NO: 23653 - protein, 431 aa, unidentified
MQRAFVLDQNKKPLMPCHPARARELLRKRKARIFKLYPFTIILTEREAGTVQNVAFKIDPGSKQTGIVLAADFKRGKRVIWAAVLEHRGQQIKNALESRRAIRRSRRTRQTRYRPARFLNRHTDKGRLPPSLQSRIENVWTWLCRLNRACSISNIAQELVRFDTQLLQNAEISGVEYQQGALQGFEVREYLLEKWQRKCAYCGKKDVPLEVEHIHPKSRGGSNRISNLTLACHECNQAKDTQTAAEFGHPEIQQQAKLPLKDATAVNATRWALYSRLQTTGLPIEIGTGGRTKFNRVTQGYPKAHWIDAACVGESGEWIYLNPEQAYLHIKATGHGSRQMCRTNQYGFPTRHRLRQKQHFGFQTGDMVKAIVPAGKYTGTHIGRVACRATGSFDITTATGKVTVSHKHIKTMHHSDGYSYTKGLGAIPPRT

SEQ ID NO: 23654 - protein, 460 aa, unidentified
TIQLKYENIPVLQPVTLAEDPGRTNIGVAVLSPLGNLMFAAVIETRNKEIKKLMADRKAHRQASRRGERRARQRLAKKYGTIIKAGMAMRKLPQYAADKFVACKFIRNTEARFCNRKRRTDWLTPTVNHLVQTHLNVIKKISRYLPVTDIAIEVNRFAFMQMENPNASGVDFQNGPLKGFNDVKAAIREQQHGKCLMCKNDIEHFHHMVPRSKGGSDTIQNQVGLCPKCHAKVHTDTSFRKKLGDKKSGLLKKYGALSALNQAIPFICKGLLEEYGEKHVRFCTGKETSLIRTSLGYEKTNENQMHEVDAYCIGLAMLGVKNIKFQQFDNTYKIKQFRRQNRSIIHHQTERSYYLGKQKIATNRKPRFEQTGDAISDWYEKQLKTCENGEAGKLLSALKVKKSSRFYNSKGRLMPGTIFFYNGQRHVISGQLTGGRYLRAYGDTKTNYPISKCKILKHNE

SEQ ID NO: 23655 - protein, 202 aa, unidentified
GNAPDNHGTLCDDCHKKFHLGIITDVKLKTRRRQSTRDAAFMGIMRKTLMWRLRTELFIPVAETKGYITKATREKLLVLPKSHTRDALAIAQGRHGFGIKEYAYVEPANHIYTVRPVRHHNRQLHKASILKGGIRKRNQASKYIFGFRLYDKVLYQGKACFVWGRRTSGTFLLRTIDGIKVKDGVSYRNLTLLERSSNYLIA

SEQ ID NO: 23656 - protein, 384 aa, unidentified
MVYVINKQGQALMPTERFGKVRRLLKNSLAHVVCRIPFTIQLDYDTTDYTQPVSLGVDAGSKHIGISATTSEKELYAADVELRNDIVDKLSTRRELRRTRRSRLRYRKARFNNRVSSKRKGWLAPSVENKIQTHLTVVENIHKFLPITNIVVETASFDIQKINNPSISGSEYQQGEQLDFFNVREYVLFRDNHICQHCKGKSKDKVLNVHHIESRKTGGDSPKNLITLCETCHKAYHRGEFKLNIKRGKSFRDSAFMGIMRWSFYNRLKNIYPNVSMTFGYITKNTRITNNLPKDHYVDARCISGNPVAKPLGYYFYQKKVRCQNRQIHKANFLKGGRKKLNQAPFLVKGFRLFDLVEYQKELYYIFGRRSSGSFDIRKALMNK

SEQ ID NO: 23657 - protein, 540 aa, unidentified
KQKVMVYILNKKGKPLMPTTRCGHVRKLLDSKKAVVVSSNPFTIRLKYDTPNGVQDVFAGIDSGRENIGSGASNEDGDCLYLGELKTSNKSIKMKMTERAGFRKERRSHDRQNKQRKARKDHTEIQNGNADICRTTISCKSVQISYPAAEKSVTHKIIRGKEGKFANRHRDEGWITPSARQLVQMHMNDLKSMCRILPISHVTLERVAFDFQKLENENIKAWEYGKGKLYGYDSPEEYIHDVQGGKCLICGKPHIDYLHHIIPRSKGGSNKVSNLAGLCYDCHYGPMGVHNCQDTQDRLPELKNEANKQYKVSLLNSVMPVLIEEMDKFCKANSIIFSICGGHDTAKVRDMYDLQKDHCIDGFAISLAGRNVKSVDVMPDRIHQKQRYKKKSKNIIQKRNCREYYDGKKLAAVNRHKGTDQKADSLEEYMNTYAETHTADECKKHFESLTVKPARRTYTFHKEGRICPFHIGDKVRYEKKNKIKGNTKVETFICEGIRFPKDENKAKVEHNKTKSKKMKFCRVLEPGCTPYIDYRKLVLI

SEQ ID NO: 23658 - protein, 268 aa, unidentified; identical to SEQ ID NO: 10068

SEQ ID NO: 23659 - protein, 431 aa, unidentified; identical to SEQ ID NO: 4463

SEQ ID NO: 23660 - protein, 439 aa, unidentified
GSQPVERPRRQNLRVFVFNKRGKPLMPCSPAKARLLLKEKKAIVVRRTPFTIQLTIATGESKQPVSLGVDAGYKHVGLSASTEKAELYASEVELRQDITDLLSARRALRQSRRNRKTRYRAPRFDNRIRTKRKGWLAPSVENRINAHLSRIEAVLRLLPITKITVETASFDMQRLKNPDISGKEYQEGEQLGFWNVREYVLFRDGHVCRHCHGRSKDPVLNVHHLESRRTGSDSPDNLITLCETCHKALHRGEITLKAKRGQSFRAQAFMGIMRREVLNRLKASYPELKVHETYGYLTKHARIANGIVKSHGADAFCIAGNLGAERLGEFFFQKQTRRNNRQIHKLSILKGGIRKRNQAPFEAKGFRLFDKVACQGEEGFIFGRRSSGSFDVRKLDGTRISAGISCKKLRLLEKRRTYLTEIRKEEALPPLPEGRGLRA

SEQ ID NO: 23661 - protein, 302 aa, unidentified
PSVENRINAHLSRIEAVLRLLPVTKITVETASFDLQLLKNPDISGKEYQEGEQLGFWNIREYVLCRDGHVCQHCYGRSKDPVLNVHHLESRRTGGDSPGNLITLCETCHKALHRGEITLKPKRGQSFRAEAFMGIMRWEVLGRLKASHPELEVNNTYGYRTKHARIANDIAKSHCADAFCIAGNLGAERLGEFFFQKQTRRNNRQIHKLSILKGGIRKRNQAPYEIKGFRLFDKVACQGEEGFIFGRRSSGFFDVRKVDGTRISAGISYKKLHLLEKRRTYLTEIRKEEVLPPLPEGRGLRA

SEQ ID NO: 23662 - protein, 428 aa, unidentified
LKVFVLNMRGQPLMPCSPAKARHLLKAGKAVVKRRTPFTIQLRIATGETKQSVTLGVDAGAKHVGLSAATEKEEVFASEVELRQDITGLLAARLSLRRDRRHRKTRYRAPRFLNRVRSKHKGWLAPSVENRIQAHMSRIDAVCRLLPVTKIVIETASFDIQKIKDPSVEGTDYQQGDQLGFWNVREYVLFRDGHVCQHCHGRSKDKILNVHHLESRQTGGDAPNNLITLCETCHKACHAGKIKLKVKRGQSFRAEAFMGIMRWTLLDRMRKAHSGLPVENTYGYLTKNTRITLGLPKTHCVDAYCIAGNLKAVRRGVYLHQRQMRKHNRQIHKCTVLSKTLKDGTKIGYRKLNQTPHLVKSFRLFDKVRCLGQTGFIFGRRSSGYFDVRRLDGVKLSPSISWRKLTLLEKRSTYLTELRKEDGASSPV

SEQ ID NO: 23663 - protein, 636 aa, unidentified
  source 1..636: note = Sutterellaceae bacterium
LTIATGETKQPVSLGVDAGYEHVGLSASTEKAELYASEVELRQDITDLLSARRALRQSRRNRKTRYRAPRFDNRIRTKRKGWLALSLENRINAHLSRIEAVLRLLPVTKITVETASFDLQLLKNPDISGKEYQEGEQLGFWNIREYVLCRDGHVCQHCYGRSKDPVLNVHHLESRGTGGDSPGNLITLCETCHKALHRGEITLKAKRGQSFRAEAFMGIMHWEVHNRLRALHPGIEVSNTYGYRTKHARIANGIAKSHCADAFCIAGNLGAERLCEFFFQKQTRRNNRQIHTLSILKGGIRKRNQAPFEVKGFRLFDKVACQGEEGFIFGRRSSGFFDVRKLDGTRISAGISCKKLHLLEKRRTYLTEIRKEEALPPPCLKAGAPRLNVMNNIDFHGIEEIWSSLSTSSLLWLTVTLAAYLFAQKLYKWSNWNSLLNPVAVSIVTVVLLLMATHTPYQTYFSGAQFIHFLLGPTTVALAVPLYDLRIQLAKNWLPILLGLFAGAVTAITSTVLIAGLLGASPETIISLAPKSVTTPIAMSIAEKLGGLPALSASLVVLTGVLGSICAGPLFLLLKVDSSSAKGFALGLSAHGMGTSRAFQIDSTAGAYGSLAIGLTGLTTALLAPLLTPLLMKLFF

SEQ ID NO: 23664 - protein, 311 aa, unidentified
LSRLAPVTAISQELVRFDTQKLDNPEISGVEYQQGTLLGYEVREYLLEKWGRECAYCGTTDTPLEIEHVVPRSRGGSNRVSNLTLSCHPCNAEKDSQTLTDFFATNKGLKKRLKANGLSADAQLERVQRQLKQPMRDASAVNATRWALFSALKTTDLPVAVSSGGRTKYNRQRLNIPKTHALDAACVGAFGKLYDWTVPTLTIKAMGRGSYQRTRLTKHGFPRGFLMRQKQVHGFQTGDMVRAIVPTGKKAGTHTGRVAIRKTGSFNIQAEYGAVQGISHKYCTLIQRSDGYGYYVTLFSNLTGEAGRAVA

SEQ ID NO: 23665 - protein, 413 aa, unidentified; identical to SEQ ID NO: 10778

SEQ ID NO: 23666 - protein, 433 aa, unidentified
  source 1..433: note = Bacterium sp.
VPDVKSLFNNHEEYLLLLTGDFKDIMLVYVINKNGNPLMPCKPAKARKLLRDNKAKVVNRCPFTIQLQWDCEENIQEVTIGIDKGSGISGFSCVANEQILMSGEIHHRTDIKDKMDARRGNRKNRRARKWYRPKRFLNRASSKRSGRLPPSIKSNVEEVIRVVRQIPLPIIKIVIEDVQVDIARLNNPDLQGKEYQQSSRLSENLRIATLMRDDYQCTQCNKKSNLDAHHIIWKEHGGKDTIENLITLCKQCHKKVHKEKLKLNVEGVSGFKDKIAQRTMQGKAYLYEKLSQQAPLSKVFGYQTYSYRKSLSLPKEHDIDALCVATLETGEVIPPNRENFYLIKFRPRQTRRQFHDLPRKGMGRLRYQVNAQSFGFRKGDIVRVKVKWVKQINSIYSSGYLAFKRVRGEPNSAKPKDCQLLQRGQTVIWEKAV

SEQ ID NO: 23667 - protein, 386 aa, Alistipes sp.; identical to SEQ ID NO: 22948

SEQ ID NO: 23668 - protein, 435 aa, Moorena sp.
MQNYIFIIDTNKQPLNPISPKKARRLLEKGKAAVFRMYPFTIILKTAIRQSRRCANDNPTISPCQIKIDPGSKKTGFALVQDDQVIWGMELEHRGGLIKKKLESRGAARRGRRNRNTRYRKPRFLNRKRPKGWLTPSLEHRILTIQTWVKRLIKFCPVNEIWVERVKFDTQKMQNPEINGVEYQQGELAGYEVREYLLEKWGRECAYCGKQNIPLQIEHIHPKSKGGSDSAKPTLRERVSNLCLACEKCNQRKGNKPIEEFLKKKPSLLQKIKTKAKQSLKDPAAVNATRNKLVKVLRRMKPVVTGTGAQTKYNRTKLGFPKEHWIDAACVGDIKPLSLRTTQPLLVNCKGQGGRQKAALNKYGYPIRHNPLKPIKGWMTGDIARHQKLGIGKVTPRSKGSFGFTPLGMKGYKSCKSQDISAIHRKDGYIYSFCK

SEQ ID NO: 23669 - protein, 424 aa, unidentified; identical to SEQ ID NO: 13009

SEQ ID NO: 23670 - protein, 473 aa, unidentified
LYIKMTSCTCTVFPAYNYAKASSSQGKHNLLLRQERLIVKEVAYMSTVYVLNKDGKPLMPTTRCGHVRHLLKEQKARVVTSKPFTIQLLYEADDVVQSLYLGIDPGRTNIGVAVVKADGTAVFTAHLETRNKEIPKLMKKRKESRRARRTNGRRCRRQRRAKANGTISKKCVKHDTAQNGSVSKRAKEIGVIKRHLPGCEKDVLCIGIKNKEAKFSNRTRPEGWLTPTTNQLLQTHINLVKKIQKFLPISDVVLEINKFAFMRLDNPNVQKWQYQQGPLYQKANLEETVSEMQEHHCLFCKKKIDHYHHVVPQHKNGSNTIDNIIGLCTQHHDLVHKDATWQKRLAKKKTGLNKKYGALSVLNQIIPALTKELSSLFPKHFFVTNGKSTYDYRAAHGVSKDHWLDAYCIACSVLPNDTCDKTINSRVPYELKQFRRHDRRALNNENMSRVYTFNGKMVATNRHKATEQTTDSL

SEQ ID NO: 23671 - protein, 341 aa, unidentified
SDLLSARRALRQSRRNRKTRYRAPRFDNRIRTKRKGWLAPSVENRINAHLSRIGAILRLLPVTKITVETASFDTQLLKNPDISGKEYQEGEQLGFWNVREYVLFRDGHACQHCHGRSKDPVLNVHHLESRRTGGDSPGNLLTLCETCHKALHRREIKLKTKRGQSFRAEAFMGIMRWEVLNRLKASHPELEVHNTYGYRTKHTRIVNGIDKSHCADAFCIAGNLGAKRLGEFFFQKQTRRNNRQIHKLSILKGGIRKRNQAPFEVNGFRLFDKVACQGEEGFIFGRRSSGFFDVRKLDGTRISAGISYKKLHLLEKRRTYLTEIRKEEALPPLPEGRGLRA

SEQ ID NO: 23672 - protein, 329 aa, Nostoc sp.; identical to SEQ ID NO: 8539

SEQ ID NO: 23673 - protein, 447 aa, unidentified; identical to SEQ ID NO: 3915

SEQ ID NO: 23674 - protein, 439 aa, unidentified; identical to SEQ ID NO: 23291

SEQ ID NO: 23675 - protein, 283 aa, unidentified; identical to SEQ ID NO: 15642
  source 1..283: note = uncultured cyanobacterium

SEQ ID NO: 23676 - protein, 436 aa, unidentified
MQYVYVLNKHGEPLMPCSSGKARLLLKQQKACVVKRTSFTIKLLFGSTGYKQPITLGVDAGSKHVGLSASTEKRELYCEEFTPRNDVVDLLSTRKQNRRSRRNRKTRYRAPRFDNRVHSKHKGWLAPSVEVKIQEHITVIKRICRILPITLVRVETAEFDTQRLKAMLEGKPLPVGTDYQLGEMYDEYNVRQYVLKRDHYTCQCCGAHTTTKKTVKLHVHHLESRKVGGNAPSNLITLCTTCHDALHKGKVSLDGKERGKPLRDAAFMGIMRKTLMARLRDELSIPVQGTYGYITKMRREQNDIKKSHVNDARCISKHPLAEPCSVCYRTKAIRHHNRQIHKANFSKGGIRKRSQMPYVVEGYRLWDKVLYKGQECFVSGRRASGSFTLKKLDGTRISKGVTFKKIAAIRACNKLSNRKDVNGQFLPRLKSRDSLP

SEQ ID NO: 23677 - protein, 431 aa, unidentified; identical to SEQ ID NO: 21531

SEQ ID NO: 23678 - protein, 466 aa, unidentified; identical to SEQ ID NO: 4644

SEQ ID NO: 23679 - protein, 406 aa, Moorena sp.; identical to SEQ ID NO: 9574

SEQ ID NO: 23680 - protein, 515 aa, unidentified
MTALEERLSKTEYIYVLGFDGKPQMPTRRKRHVLKLLKTGRARIAEDIPLTIRLTYRNAPVLQPVTLAEDPGRTNIGAAVLSPLGDLLFAAVIETRNKEIKKLMADRKKSRQASRRGERKARQRLAKRYGSMVKSGMVMRKLPMYAADRFVTCKFIRNTQARFCNRKRCPDWITPTVQHLVQTHLNIIRKISRYLPVTDIAFEVNRFAFMHMENPEAMGVDFQNGPLKGYDDVKEAICTQQHGKCLMCKKPISHFHHIVPRSRGGSDTIQNLAGLCPECHTKVHTDTAFRKDFDEKKSGQLKKYGALSALNQAVPFICKKLLEEYGEEHVHFCRGLDTSLIRTALGFEKTKKDQMHEVDAYCIGLAALEVNEVETPAFDHTFQIRQFRRQDRSIIHHQTGRSYYQGKEKVAQNRKPGFEQKTTALSQWYKEQVRIHGEKEAEKLRSQLRVEKSCRHYNDMDRFLPGAVFLYEGKRYVLSGRITNGKYLRACGQGMKNFPAAECTFIRHNAGLVFI

SEQ ID NO: 23681 - protein, 426 aa, Calothrix sp.; identical to SEQ ID NO: 17573

SEQ ID NO: 23682 - protein, 417 aa, unidentified
MPCSPAKARLLLKEKKAIVKRRTPFTIQLTIATGEAKQPVALGVDSGYKHIGLSATTEKAELYASEVELRQDITDLLSARLALRRSRRSRKTRYRAPRFDNRVASKREGWLAPSVENRIAAHMSRVEAVMRVLPVTAITVETAAFDTQLLKNPDIAEAAYQQGEQLGFWNVREYVLFRDGHVCQHCRGKSKDPILNVHHIESRRTGGDAPNNLITLCETCHKAFHRGEIELKVRRGKSFKAETFMGIMRWTLFERLKKAHPELRVRNTYGYLTKHKRISHGIAKSHCADAYCIADNLGAKRLEGFFFQKQTRKHNRQIHKLSILKGGLRKKNQAPYEVKGFRLFDKVICKGEEAFIFGRRTSGSFDVRRLDGTRISAGINYKKLRLLEPRTTYLTEFRMEAALPPLHECRGFRAEFL

SEQ ID NO: 23683 - protein, 400 aa, unidentified
AKVKKRTPFTIQLVYGSSGYTQEVILGVDAGSKTIGMSASTKKEEVFAADVTPRNDVVDLMSTRREFRRARRNRKIRYRKPRFDNRVRSKHKGWLAPSVEVKIQEHITAIRRVCGILPVSKVVVETAEFDLQLLKAIADGKPVPQGEDYQKGEMYGHYNVRQYVLWRDNYTCQCCGTHPSKKKEVRLHVHHLESRKVGGDAPDNQVTLCESCHEKLHKGLIAEKDFKKRKRKSTRDATFMGIMRKTLMQRLCSELPIPVVKTRGYITKATREKLLVLPKSHTNDALAIAQGKQGFNVGYLPGIVQIDKICTIRPVRHHNRQLHKATILKGGIRKSNQTEKYVFGYRLFDKVQFNGQDCFIWGRRTTGIFTIKTINGKMIKDGISFKKLKPVEKSTGYLIA

SEQ ID NO: 23684 - protein, 381 aa, unidentified
QLFTIKLLYETTNYTQDLTLGVDTGSGTIGTAVSTNNSKIVYASEVVIRNDITDKMTQRAKYRRNRRNRKTRYRKARFLNRKNSIRADRFNPTMVSKLYSHVKEIEYIKSILPIKTLVLEIGQFDPHLMQNPELKYKPWGYQKGKNYGFANTKEMVLNRDNYTCQYCKGKRKNSKLEVHHIIYRSNHGSDDENNLITLCQTCHKLLHNGEIKLNLKGKSKGTLKYATQMNSIRKQLLRIYPEAIETFGFVTKDNRLNINVDKHHYLDACVIATGGKEFQICCNIYKKRCISKGDFQQTKGVRSEQKLNTKKICGFRKFDKVKYFGKEYFIKGRMSTGYAVLMDIEGKKIDFSDMPKGYKSVKLNNCKRISARKSQLITLYS

SEQ ID NO: 23685 - protein, 397 aa, unidentified
  source 1..397: note = Bacterium sp.
MKVYVQDKNGNPLDPTMPARARILLKRSRAEVVVRTPFTIRIVDREGGYTKDVILGTDPGYSIIGFSAVTKKEELIAGVVELRSDIPKKLEQKRSYRRGRRTRNTRYRQPRFNNRKRENGWLAPSVREKKDTHQKLINKLKEILPITNTVVEVAKFDTQKMQNPEISGLEYQQGTLQGYHIREYLLEKWDRKCAYCGKTDVPLQVEHIIPPKRGGSDRVSNLTIACEKCNQKKGNKTAEEFGYSEIQKKAKKSLKEAAFMNIVRWEIVDELDCDYTYGYITKQRRIELGLEKSHLNDAFIIAGGECQKRAKEYSVYQRRRNNRSIQTNRKGYGRSIRKKKYKFQPGDLVRKDHCECKVKGVFNYGKWVRLVNQFGEVINSNIKNVELVKYGKGLSFT

SEQ ID NO: 23686 - protein, 430 aa, unidentified; identical to SEQ ID NO: 9043

SEQ ID NO: 23687 - protein, 411 aa, unidentified; identical to SEQ ID NO: 8372

SEQ ID NO: 23688 - protein, 289 aa, Parasutterella sp.; identical to SEQ ID NO: 15206

SEQ ID NO: 23689 - protein, 325 aa, unidentified
LWGVDKLIEQRRGYRQRRRYWKRYRKERFSNRASTRRKGRITPTILQKRQAVVRVVDRLSKYIRIDSIYLEDVAIDVRVLTDEKRLYSWQYQQSNRLDENLRKATILRDRCQCQMCGKRNCRLEVHHITPRRMNGANTIGNLITLCADCHSKVTGCEMEFAEQLYSKIGKKKNNAGLQYSSHVMVGKTWLREELSKRAPIFITTGGDTANKRIDWSLEKSHEIDAVCITNLEPESVGVKPWNVKPLRHQRKTMKVKEILRFRHRDIVCYTFKNGEYHEGYVTALYPSEGKQKEGLNFLSPTKHCKRVNPKKCQRLDRPDKFLWLA

SEQ ID NO: 23690 - protein, 460 aa, unidentified; identical to SEQ ID NO: 20157
  REGION 1..460: note = IscB polypeptide

SEQ ID NO: 23691 - protein, 375 aa, unidentified
VSKRAKEISVIKRHLPGCEKDVLCIGIKNKEAKFNNRTRPTGWLTPTANQLLQTHINLVKKIQKFLPISDVVLEVNKFAFMQLDNPNSQKWQYQKGPLYQKESLKSAVSEMQEHHCLFCKKKIDHYHHVVPQHKNGSNTIDNIVGLCTQHHDLVHKDATWQKRLAKKKTGLNKKYGALSVLNQIIPALTKELSSLFPKHFFVTNGKSTYDYRAAHGVSKDHWLDAYCIACSVLPNDTCDKTINSRVPYALKQFRRHDRRALNNENMSRVYTFNGKMVATNRHKATEQTTDSLEEFRQRQPNDVCNLKVKEHHPTYRNMSRNYPGSIFLVEKQVHIMQGIAGSKDGKATTYKDTNANSIAAGKCKFVAKNSGILFV

SEQ ID NO: 23692 - protein, 439 aa, unidentified; identical to SEQ ID NO: 17763
  REGION 1..439: note = IscB polypeptide

SEQ ID NO: 23693 - protein, 435 aa, unidentified; identical to SEQ ID NO: 11554

SEQ ID NO: 23694 - protein, 392 aa, Moorena sp.; identical to SEQ ID NO: 5076

SEQ ID NO: 23695 - protein, 403 aa, Erysipelotrichaceae sp.; identical to SEQ ID NO: 15470

SEQ ID NO: 23696 - protein, 403 aa, unidentified
RCRRQRRAKANGTISKKCVKQTTAQNGSISKHAKEIGVIKRRLPGCEKDILCIGIKNKEAKFNNRTRPEGWLTPTANQLLQTHINLVKKIRKFLPISDVVLEINKFAFMQLDNPNVQKWQYQQGPLYQKASLEEAVSEMQEHHCLFCKKPIAHYHHVVPQSENGSNTIGNIVGLCTKHHDLVHKDTAWQKKLTKKKTGLNKKYGALSVLNQIIPALTKELSSLFPKHFFVTNGKSTYDYRAAHGVSKDHWLDAYCIACSVLPNDTCDKTINSRVPYELKQFRRHDRRALNNENMSRVYTFNGKMVATNRHKATEQTTDSLEEFRQRQPNDVCNLKVKEHHPTYRNMNRNYPGSVFLVGNQVHVMQGIAGSKDGEATTYKDTNANSIAAGKCKFVAKNSGILFV

SEQ ID NO: 23697 - protein, 415 aa, Parasutterella sp.; identical to SEQ ID NO: 23462

SEQ ID NO: 23698 - protein, 396 aa, unidentified
AKANGTISKKCVKQTTAQNGSVSKRAKEIGVIKRHLPGCEKDVLCIGIKNKEAKFSNRTKSEGWLTPTANQLLQTHINLVKKIRKFLPISDVVLEINKFAFMQLDNPNVQKWQYQQGPLYQKANLEEAVSEMQEHHCLFCKKPIAHYHHVVPQSENGSNTIGNIVGLCTKHHDLVHKDTAWQKKLAKKKTGLNKKYGALSVLNQIIPALTKELGSLFPKHFFATNGKSTYDYRAAHGVRKDHWLDAYCIACSVLPNDVCDKNINSRVLYELKQFRRHDRRALNNENMSRVYTLNENVVATNRHKATKQTTDSLEEFRQNHPDDACKLKVKEHHPTYRNMSRNYPGSVFLVGNQVHVMQGVAGSKDGKATTYKDTNANSIAAGKCKFVAKNSGILFV

SEQ ID NO: 23699 - protein, 421 aa, unidentified
MKVYVINKDGRQLMPCRPAKARKLLRDEKAKSVKRLPFTIQLKWDCEENIQKITVGIDKGSHTTGYCAIANGEILMSGYINHRTDVKKKMQGRAANRRQRRSRLWYRKARFDNREAAKRAFRLPVSIKTNVEEVIRTINKLPLPIKVVIIEDVQIDIAKLNDAKLNGKYYQQSNRLHENLRLVSRFKFFEEKLKPRKLIRDHFTCQYCKAKQTPLEAHHIHYRKNGGSETIKNLITVCSNCHDGIHDGTITLKKKGVDGFKDQIAQRTMQGKNYLYSKLNKKYKVSKVYGYETSAFRKEQGLPKAHDADALAVATLRTGEVIPFHKDHFYHINFRATQTRRQYHVQPKKGKGRVKYQVNQRVGKFSKGDIVLVKEKFLKQINSIYSNGRLAFRRIPGEPFSSTPSNCRLLERQSSLVFSSI

SEQ ID NO: 23700 - protein, 363 aa, unidentified
GLSASTEKAELYASEVELRQDITDLLSARRALRQSRRNRKTRYRAPRFDNRISTKRKGWLAPSVENRINAHLSRIEAVLRLLPVTKITVETASFDLQLLKNPDISGKEYQEGEQLGFWNIREYVLCRDGHVCQHCYGRSKDPVLNVHHLESRRTGGDSPDNLLTLCETCHKALHRGEITLKAKRGQSFRAEAFVGIMRWEVHNRLRALHPGIEVSNTYGYRTKHARIANGIAKSHCADAFCIAGNLGAERLCEFFFQKQTRRNNRQIHKLSILKGALRKRNQAPFEVKGFRLFDKVACQGEEGFIFGRRSSGFFDVRKLDGTRISAGISYKKLHLLEKRQTYLMEIRKEEAFPPLPEGRGLRA

SEQ ID NO: 23701 - protein, 412 aa, unidentified; identical to SEQ ID NO: 5053

SEQ ID NO: 23702 - protein, 376 aa, unidentified
PVSLGVDAGYKHVGLSASTENAELYASEVELRQDVSDLLSARRALRQSRRNRNTRYRAPRFDNRIRTKRKGWLAPSVENRINAHLSRIETVIRLLPVTKITVETTSFDMQLLKNSDIAGKKYQEGEQLGFWNVREYVLFRDGHVCQHCHGRSKDPVLNVHHLESRRTGGDSPGNLITLCETCHKALHRGEITLKAKRGQSFRAETFMGIMRWEVLDRLKASHPKLEVQNTYGYRTKHARISNGIAKSHCADAFCIAGNLGAERLGEFFFQKQTRRNNRQIHKLSILKGGIRKRNQAPYEIKGFRLFDKVACQGEEGFIFGRRSSGYFDVRKLNGTHISAGISCKKLRLLEKRQTYLTEIRKEKALPPLPEGRGLRA

SEQ ID NO: 23703 - protein, 428 aa, Moorena sp.
MQNYVFVIDANKQPLNPIHPRKARRLLDKGKAAVFRMYPFTIILKTPIRQSRRCANASPTIPPCQIKIDPGSKVTGFALVQDNQVIWAMELEHRGGLIKKKLESRRAVRRGRRNRNTRYRKPRFLNRKRPEGWLAPSLEHRVLTIQTWVKRLIKFCPVNEIWVERVKFDTQKMPNPEISGVEYQQGELAGYEVREYLLEKWGRECTYCGKQNVPLQIEHIHPKSKGGSGRVSNLCLACEKCNQRKGNKPVEDFLKKKPKLLQKIKTKAKQPLKDAAAVNATRNKLVKVLREVKSVTTGTGAQTKYNRTKLGLPKQHWIDAACVGDIETLVLKTSQPLLVTCFGQGGRQKAALNKYGYPIRHNPLKSIKGWCSGDIAKNLLTGEFGRVNPRSKSNSFNYTVSGKKAISLHVKNLARVHRKDGYTYGFCQ

SEQ ID NO: 23704 - protein, 431 aa, unidentified
MPDKVYVISRLGHPLMPCSPAKARHLLDDGKAKVVKRTPFTIKLLYGSTEYTQPVILGVDAGSKTIGLSASTTKEELFAAEVMPRNDVVENLSTRREFRRARRNRTTRYRKPRFNNRVHSKNNGWLAPSVEVKIQEHITSIKRVCAILPISKIVVETAEFDLQLLKAVQDGKPVPEGEDYQKGEMYGSYDVRQYVLWRDNYTCTCCGVKGTDKKPVKLHVHHFESRKHGGNAPDNYGTLCEDCHKKLHLGIITPDILKKRKRRSTRDAAFMGIMRKTLMQRLITGLSIPVAETKGYITKAAREEILKLPKTHTNDALAIAQGRHGFGIREQAYVKPTNRIYTVRPVRHHNRQLHKATMLKGGIRKLNQASKYIFGFRLYDKVLYQGGECFVWGRRRSGSFLLRTIDGTKVKDGVGYRNLTLLERSTNYLIA

SEQ ID NO: 23705 - protein, 512 aa, unidentified; identical to SEQ ID NO: 5549

SEQ ID NO: 23706 - protein, 414 aa, unidentified
MVYVINKQGQALMPTERFGKVRRLLKKSLAHVVCRIPFTIQLDYDTTDYTQPVSLGVDAGSKHIGISATTSDKELYAADVELRNDIVDKLSTRRELRRTRRGRLRYRKARFNNRISSKRKGWLAPSVENKIQTHLTVVEKIHKFLPITNIVVETASFDIQKINNPSISGSGYQQGEQLDFFNVREYVLFRDNHTCQHCKGKSKDKVLNVHHIESRKTGGDSPNNLITLCETCHKAYHRGEFELNVKRGKSFRDAAFMGIMRWGFYDRLKNIYPNVSMTFGYITKNTRITNNLPKDHYVDARCISGNPMAKPLGYYFYQKKVRCQNRQIHKANFLKGGRKKLNQAPFLVKGFRLFDLVEYKKDLYYIFGRRSNGSFDIRKLDGTKVNKGSINCKHLRLISTRKSILTEKRTKVNL

SEQ ID NO: 23707 - protein, 514 aa, unidentified; identical to SEQ ID NO: 15959

SEQ ID NO: 23708 - protein, 292 aa, unidentified
LSRIEAVLRLLPVTKITVETASFDLQLLKNPDISGKEYQEGEQLGFWNIREYVLCRDGHVCQHCYGRSKDPVLNVHHLESRRTGGDSPGNLITLCETCHKALHRGEITLKAKRGQSFRAEAFMGIMRWEVLGRLKASHPELEVNNTYGYRTKHARIANDIAKSHCADAFCIAGNLGAERLGEFFFQKQTRRNNRQIHKLSILKGGIRKRNQAPFEVNGFRLFDKVACQGEEGFIFGRRSSGFFDVRKLDGTRISAGISYKKLHLLEKRRTYLTEIRKEEVLPPLPEGRGLRA

SEQ ID NO: 23709 - protein, 438 aa, unidentified
  source 1..438: note = Bacterium sp.
MLVYVKNKNGNPLMPCKPAKARKLLRDKKAKVVNLNPFIIKLQWDCEENVQEVAVGIDKGSSVTGFSCVGNGKILMSGEIHHRTDIKGKMDARRANRRNRRNRKWYRPARFNNRASSRRSGRLPPSIKANVEEVIRVVGQLPLPISHIIVEDVAVDLRRLSNLDVKGSEYQESNRLDENLRLACLTRDDFACQKCNKKETLLEAHHIVWKTKGGKDSIYNLITLCFSCHDKVHKKGESGKVRIKGGKVVKGMDGFSDKIAQRTMQGKTLMYQELEKIALLSTVYGYQTSAYRKSLSLPKTHDIDALCVATLLNNPLPPLLRGTGEVILSSAFPGTSVTHHREIFYTIKFRQRQTRRQFHDLPQKGVGRVRYQVNASLEGFRKGDIVRVEGKWVKQINSIYSSGYLAFARVGGEPSVAKPKDCKLLQRGQTIVWEKVPP

SEQ ID NO: 23710 - protein, 372 aa, unidentified
MSNFVFVLDTNRKPLYPCTPGMARSLLKAGKAAVFRMFPFTIILKKAVEAIAEPLQLKIDPGSKVTGFAILLGAQLIWAAELTHRGQSIKSSLESRRSLRRGRRNRHTRYRQPRFLNRTRPQGWLAPSLMHRVLTIQTWVKRLMGFAPINSIAQELVRFDMQQIQNPEISGTQYQQGTLYQYEIREYLLAKWNRTCAYCNAQNIPLEIEHIVPKAQGGTNRVSNLTLACVPCNQKKGTQDIKDFLSKKPDLTQRILSQAKQPLKDAAAVNSTRWVLFNALKGTGLPVMTGSGGQTKFNRTSQGLPKTHFFDAACVGEIPTLEILTAQPLLIKATGRVGVKNVGLINMVFLLDTCLTPLLSRGFRRGILPKLL

SEQ ID NO: 23711 - protein, 405 aa, unidentified; identical to SEQ ID NO: 6076

SEQ ID NO: 23712 - protein, 286 aa, unidentified; identical to SEQ ID NO: 16765

SEQ ID NO: 23713 - protein, 305 aa, unidentified
WLAPSVENRINAHLSRIEAVLRLLPITKITVETASFDMQRLKNPDISGKEYQEGEQLGFWNVREYVLFRDGHVCRHCHGRSKDPVLNVHHLESRRTGSDSPDNLITLCETCHKALHRGEITLKAKRGQSFRAQAFMGIMRREVLNRLKASYPELKVHETYGYLTKHARIANGIVKSHGADAFCIAGNLGAERLGEFFFQKQTRRNNRQIHKLSILKGGIRKRNQAPFEAKGFRLFDKVACQGEEGFIFGRQSSGSFDVRKLDGTRISAGISCKKLRLLEKRRTYLTQIRKEEALPPLPEGRGRRA

SEQ ID NO: 23714 - protein, 431 aa, unidentified; identical to SEQ ID NO: 2746

SEQ ID NO: 23715 - protein, 419 aa, Geobacillus sp.; identical to SEQ ID NO: 2623

SEQ ID NO: 23716 - protein, 502 aa, unidentified; identical to SEQ ID NO: 2616

SEQ ID NO: 23717 - protein, 456 aa, unidentified
MSVFVVGLNGCRLMPTSERKARLLLKEGKASVYRKVPFTIKLNYKTGSTVQPGYLGIDTGSQHIGITAVREDGTVLHKEEIGLRDSMTKRKLLESKASLRRGRRYRKTRYRHPKWRPETKRVYCEVPDKKGRHWKKQKSTFTSGRSEGWLPPSLQSKTDHHIRWIRKLQGLLPEGYRLSIELGRFDPARMKDPGIHGDLYQKGPQYDYENVRAYVLDRDRYTCQVCKKKGGKLHVHHILYRSQGASDNPQYMATVCSSCHTTENHQPGGVLYQWMQEQKKFTRGLRDATFMNILRKRFRKTFPDAVFTYGNITKVDREKLKLPKSHGNDATAIALVRTGVTSVKNEEPVLYIQQVRRKKRSLHEETPRKGRKEPNRKAARNSKNIKAVTFTKRRGGKKTSVTACLFDRVELNGKKGWISGFTGTSCYMKDAEDNYIRTSGKYNQVSLSKLRILHHC

SEQ ID NO: 23718 - protein, 420 aa, unidentified; identical to SEQ ID NO: 8221

SEQ ID NO: 23719 - protein, 478 aa, unidentified
VRTKPFTIQLLYETDDVVQLLYLGIDPGRTNIGVAVVKTDGTAVFTAHLETRNKEIPKLMKKRKESRRARRTNGRRCRRQRRAKANGTLSKKCVKQTTAQNGSVSKRAKKIGVIKRHLPGCEKEALCIGIKNKEAKFNNRTRPEGWLTPTANQLLQTHINLVKKIQKFLPISDVVLEVNKFAFMRLDNPNIQKWQYQQGPLYQKASLEEAVSEMQEHHCLFCKNTIDHYHHVVPQHKNGRNTIDNIVGLCTKHHDLVHKETAWQEKLAKKKTGLNKKYGALSVLNQIIPALTKELSSIFPKHFFVTTGKSTYDYRAAHGVSKDNWLDAYCIACSVLPNDVCNSSINNRVPYELKQFRRHDRRALHKENMSRVYTLNGKKVATNRHKATEQTADSLEEFRQNHPDDVCKLKVKENHSEYRNPKRNFPGCVFLVGKRTHVMQGTSGSHNGKADGYYDTNGNSYSSGKCKFVAKNEGIVFA

SEQ ID NO: 23720 - protein, 431 aa, unidentified; identical to SEQ ID NO: 4463

SEQ ID NO: 23721 - protein, 396 aa, unidentified
VVRRTPFTIQLTIATGESKQPVSLGVDAGYKHVGLSASTEKAELYASEVELRKDITDLLSARRALRQSRRNRKTRYRAPRFDNRIRTKRKGWLAPSVENRINAHLSRIEAVLRLLPITKITVETASFDMQRLKNPDISGKEYQEGEQLGFWNVREYVLFRDGHVCRHCHGRSKDPVLNVHHLESRRTGSDSPDNLITLCVTCHKALHRGEITLKAKRGQSFRAQAFMGIMRREVLNRLKASYPELKVHETYGYLTKHARIANGIVKSHGADAFCIAGNLGAERLGEFFFQKQTRRNNRQIHKLSILKGGIRKRNQAPFEAKGFRLFDKVACQREEGFIFGRRSSGSFDVRKLDGTRISVGISCKKLRLLEKRRTYLTEIRKEEALPPLPEGRGLRA

SEQ ID NO: 23722 - protein, 349 aa, unidentified
IKNKETKFTNRTRPEGWLTPTANQLLQTHINLVRKMQKFLPISDVVLEVNKFAFMRLDNPNIQKWQYQQGPLYKKESLESAVSEIQEHHCLFCKKPIDHYHHVVPQHKNGSNTIGNIVGLCAKHHDLVHKDSAWEKKLAKKSTGLYKKYGALGVLNQIIPTLTNELSSLFPKHSFVTNGKSTYDYRAAHGVSKDHWLDAYCIACSVLPSNVCDSNINNHMPYELKQFRRHDRRVLNNENMNRVYTLNNKAVAINRHKAKDQKTVSLEEFRKEHPDDVCKLKVKEHHPTYRNMNRNFPGSVFLVGKQIHVMQGIASSKDGKATKYNDTSATAIAAGKCKFVAKNTGILFV

SEQ ID NO: 23723 - protein, 327 aa, unidentified
MPITHATVEVGSFDTMLVKAIQEGKAIPEGADYQKGPRYNLATLREAVFYRDNYVCKVCGRKATEGAILHMHHMFYWKGRHGNSLNELLTVCEKCHTPANHQKSGKLYGFGEDVKFADLSGAAFMNTVRWQIVNELYAAFGKPFVTITYGAMTKEKRIALQLEKSHNNDAYAMGEFHPNHRCAFEHYEKVRRNNRILEKFYDSQYIDIRTGEIATGKELFNGRINRNHKKDSENLHKYRGKRTYAGHRALLRKKVNLNPGDLVSLNGEPLVVLGTHTRKNGAVNVEFETPSKSGRKSASLKKLKIVKAADSIHPAWEKVSQIIQRKK

SEQ ID NO: 23724 - protein, 463 aa, unidentified
LAGKIQHKGGQLMSVAVISKTGERLMPTSEYRTRKLLKSGKAIKYSYHPFTIQLTERKTGNIQPIELCMDTGYIHIGISVKSEKHEYLTEQIDTLTDERSRHNARRMYRSQRRNRKRYRQPRFNNRKKDKGWIAPSLEHKKNIHVQAISRINNVMPLTDITMEMGNFDTQVLKAKEEGRPLPQGVDYQHGERYSIATLREAVFARDGYKCQCCGRTIKDGAILHVHHIKYRSQGGTNSISNLATVCDKCHTPKNHKPGGKLYGWKPKLPSFKGATFMTTIRWQLYNEAKALFPDIDIHITYGAATKERRRELNIDKSHINDAFVMGQFHPRHRIKAVLYKKKRRNNRCLEKFYDAKYIDSRDGKKRSGQELFNGRINRNHKKDSENLHQYRLQKVTAGKRTVRKQHYSVQPHDIIIYESRKRETTGCHCNGARVMLLPDKKSVSIKKIKIYRYAGGYFKSTFN

SEQ ID NO: 23725 - protein, 361 aa, unidentified; identical to SEQ ID NO: 7533

SEQ ID NO: 23726 - protein, 372 aa, unidentified; identical to SEQ ID NO: 23710

SEQ ID NO: 23727 - protein, 431 aa, unidentified
MPDKVYVISRLGHPLMPCSPAKARHLLDDKKAKVVKRMPITIRLLYGSTKYIQPIILGVDAGSKTIGLSASTAKGEVFAAEVMPRNDVVENLSTRREFRRARRNRTTRYRKPRSDNRVRSNHERWLAPSVKVKIQEHITSIKRVCTILPISKVVIETAEFDLQLLKAIQEGKPIPEGEDYQKGEMYGSYNVCQYVLWRDNYTCICCGVRGTPKNPVRLHVHHFESRKYGGNAPDNHGTLCDDCHKKFHLGIIADVKLKTRRRQSTRDAAFMGIMRKTLMWRLRTELFIPVAETKGYITKATREKLLVLPKSHTRDALAIAQGRHGFSIKEYAYVEPANHIYTVRPVRHHNRQLHKASILKGGIRKRNQASKYVFGFRLYDKVLYQGKACFVWGRRTSGTFLLRTIDGIKVKDGVSYRNLTLLERSSNYLIA

SEQ ID NO: 23728 - protein, 405 aa, unidentified
LDDKKAKVVKRMPFTIRLLYGSTKYIQPIILGVDAGSKTIGLSASTAKEEVFAAEVMPRNDVVENLSTRREFRRARRNRTTRYRKPRSDNRVRSNHERWLAPSVKVKIQEHITSIKRVCTILPISKVVIETAEFDLQLLKAIQEGKPIPEGEDYQKGEMYGSYNVCQYVLWRDNYTCICCGVRGTPKNPVRLHVHHFESRKYGGNAPDNHGTLCDDCHKKFHLGIITDVKLKTRRRQSTRDAAFMGIMRKTLMWRLRTELFIPVAETMGYITKATREKLLVLPKSHTRDALAIAQGRHGFGIKEYAYVEPANHIYTVRPVRHHNRQLHKASILKGGIRKRNQASKYVFGFRLYDKVLYQGKACFVWGRRTSGTFLLRTIDGIKVKDGVSYRNLTLLERSSNYLIA

SEQ ID NO: 23729 - protein, 418 aa, unidentified
MVYVLSKTGQPLMPTENHAKVRVLLKQQKAKIVHRCPFTIQLLYDSTDYTQQVSLGIDAGSRHIGVSATTETKVLYEADVTLRNDIVDLLSTRREARRTRRSRKTRYRKPRFNNRTRKDDWLAPSVKQKMDTHLTTLRKVTEILPVNSITVETASFNIQKIKNPNIASTGYQQGEQLDFWNVREYVLFRDGHKCQCCKWKSKDPVLNVHHIESRKTGGNAPNNLITLCETCHKGYHNGTVSLPKNIRRGMKFNDAAFIGAMRWAFFNRVKETYEPLGIMVNMTYGYITKNTMIEHNLPKDHFIDARCISGHPDATSDGTVFYQKKVRCHNRQIHKQKILKGGIRKRNQAPYLVKGFRMFEKVKYHGKQYFIFGRRSSGFFDLRTLDGTKVNKGSVSYKKIRSLDMPRSYLTEERKAIV

SEQ ID NO: 23730 - protein, 247 aa, unidentified; identical to SEQ ID NO: 21678

SEQ ID NO: 23731 - protein, 451 aa, unidentified; identical to SEQ ID NO: 2436

SEQ ID NO: 23732 - protein, 315 aa, unidentified
MRLDNPDIQKWQYQQGPLYKKESLESAVSEMQEHHCLFCKKPIDHYHHVVPKSENGSNTIANIVGLCAEHHNLVHKDVAWQEKLAEEKTGLNKKYGALSVLNQIIPALTNKLSVLFPKHFFVTAGKSTHDYRAAHGVSKDHWLDAYCIACSVLPSNVCDSNINNHVPYELKQFRRHDRRVLHKANMSRVYTLNGKAVATNRHKAIKQTTDSLEEFRQNYPDDVYKLKVKEHHPAYRNLNRNYPGSVFLVGKQAHVMQGIASSKDGKTTKYNDTNATTITAGKCKFVAKNSGILFVQCKFRKALSDGTTKKLQYPV

SEQ ID NO: 23733 - protein, 413 aa, unidentified; identical to SEQ ID NO: 2605

SEQ ID NO: 23734 - protein, 413 aa, unidentified; identical to SEQ ID NO: 2605

SEQ ID NO: 23735 - protein, 413 aa, unidentified; identical to SEQ ID NO: 2636

SEQ ID NO: 23736 - protein, 413 aa, unidentified; identical to SEQ ID NO: 2636

SEQ ID NO: 23737 - protein, 408 aa, unidentified
MVYVLNINGEPLMPTERYGKVRRILKSGRAKVVKRTPFTIQLLYEATNCTQPVTLGVDAGYKHIGLSATTESKEIYSSEVVERCDIVNLLKTKRECRRTRRNNKTRYRKPRFNNRVRSKHKGWLAPSVEHKIQTHIKVIQNVCSIVPVTKIRIETAEFDVHKIKNPEVQGIGYQQGEKYGFVNTRNYVLWRDNHTCRCCGKSKGVLFVVNAKGIITVAPEDLYTVCKECLDNHIKGIKPLKFKKKRHFAPPTQMGIMRNTLLDRLKNSVNVPVENTYGYVTKGIREEYGINKSHTNDAYCIAGNLQAKRLNEYYLQKKVRCHNRQIHKMNTLKGGKKKLNQAPYIVKGYKLNDKVLYDNQICFISGRRTSGYFAIKDIFGKTLSSSVSYKKLRLLETAKHYTLERIAR

SEQ ID NO: 23738 - protein, 413 aa, unidentified; identical to SEQ ID NO: 2815

SEQ ID NO: 23739 - protein, 413 aa, unidentified; identical to SEQ ID NO: 2858

SEQ ID NO: 23740 - protein, 411 aa, unidentified; identical to SEQ ID NO: 2867

SEQ ID NO: 23741 - protein, 413 aa, unidentified; identical to SEQ ID NO: 2636

SEQ ID NO: 23742 - protein, 413 aa, unidentified; identical to SEQ ID NO: 2636

SEQ ID NO: 23743 - protein, 413 aa, unidentified; identical to SEQ ID NO: 3014

SEQ ID NO: 23744 - protein, 413 aa, unidentified; identical to SEQ ID NO: 3023

SEQ ID NO: 23745 - protein, 413 aa, unidentified; identical to SEQ ID NO: 2636

SEQ ID NO: 23746 - protein, 416 aa, unidentified; identical to SEQ ID NO: 3087

SEQ ID NO: 23747 - protein, 413 aa, unidentified; identical to SEQ ID NO: 3119

SEQ ID NO: 23748 - protein, 413 aa, unidentified; identical to SEQ ID NO: 2636

SEQ ID NO: 23749 - protein, 412 aa, unidentified; identical to SEQ ID NO: 3155

SEQ ID NO: 23750 - protein, 413 aa, unidentified; identical to SEQ ID NO: 2636

SEQ ID NO: 23751 - protein, 413 aa, unidentified; identical to SEQ ID NO: 3220

SEQ ID NO: 23752 - protein, 413 aa, unidentified; identical to SEQ ID NO: 2636

SEQ ID NO: 23753 - protein, 413 aa, unidentified; identical to SEQ ID NO: 3290

SEQ ID NO: 23754 - protein, 413 aa, unidentified; identical to SEQ ID NO: 3295

SEQ ID NO: 23755 - protein, 413 aa, unidentified; identical to SEQ ID NO: 2636

SEQ ID NO: 23756 - protein, 416 aa, unidentified; identical to SEQ ID NO: 3447

SEQ ID NO: 23757 - protein, 413 aa, unidentified; identical to SEQ ID NO: 3476

SEQ ID NO: 23758 - protein, 415 aa, unidentified; identical to SEQ ID NO: 3548

SEQ ID NO: 23759 - protein, 413 aa, unidentified; identical to SEQ ID NO: 3290

SEQ ID NO: 23760 - protein, 413 aa, Erysipelotrichaceae sp.
MTTYAFVLDANNKQLAPTKEQKAWFLIRKKRATLLSRYPMVIQLKKKIPDQEICKDEIRCGIDDGGLHVGVALVQKCQTRNKVIFKGTIEQRNDVKHLMDVRRGFRRYHRDHKRYRPVRFNNRKSSKRKERIAPSILQKRQATIRVINQLNKWVNITNYWLEDVAIDIRALTDGYKPYRWQYQKSNRLDENIRKAVILRDGCKCMECGKSNCRLEVHHIKPRRLKGSNTLGNLITLCTGCHQKTEGVEELYMNRYFALLNSSDNKNLNYAQHVMIGKKWLRKQLSKLGMLHLTNGGDTANKRIDWGIAKSHSNDAICITDLRPDTCEIKEWVIKPMRRQSKAKTDNVLGIKHSDLVEYTFMNGETHRGYVTALYPEQNALNFQSPTKHCKKVNARKCKVLWKYSKIYWLDNVS

SEQ ID NO: 23761 - protein, 413 aa, unidentified; identical to SEQ ID NO: 3587

SEQ ID NO: 23762 - protein, 413 aa, unidentified; identical to SEQ ID NO: 2636

SEQ ID NO: 23763 - protein, 413 aa, Blautia sp.; identical to SEQ ID NO: 3616

SEQ ID NO: 23764 - protein, 413 aa, unidentified; identical to SEQ ID NO: 3621

SEQ ID NO: 23765 - protein, 415 aa, unidentified; identical to SEQ ID NO: 3635

SEQ ID NO: 23766 - protein, 413 aa, unidentified; identical to SEQ ID NO: 2636

SEQ ID NO: 23767 - protein, 413 aa, unidentified; identical to SEQ ID NO: 3621

SEQ ID NO: 23768 - protein, 413 aa, unidentified; identical to SEQ ID NO: 3694

SEQ ID NO: 23769 - protein, 413 aa, unidentified; identical to SEQ ID NO: 3695

SEQ ID NO: 23770 - protein, 412 aa, Deinococcus sp.; identical to SEQ ID NO: 3738

SEQ ID NO: 23771 - protein, 413 aa, unidentified; identical to SEQ ID NO: 3751

SEQ ID NO: 23772 - protein, 413 aa, Erysipelotrichaceae sp.
MTCYAFVLDANNKQLAPTKEQKAWFLIRKKRATLVSKYPMVIQLKKKIPDQEICKDEIRCGIDDGGLHVGVALVQKCQTRNKVIFKGTIEQRNDVKHLMDVRRGFRRYHRDHKRYRPARFDNRKSSKRKVRIAPSILQKRQATIRVINQLNKWINITNYWLEDVAIDIRALTDGYKPYRWQYQKSNRLDENIRKAVILRDGCKCMECGKSNCRLEVHHIKPRRLKGSNTLGNLITLCTGCHQKTEGVEELYMNRYFALLNSSDNKNLNYAQHVMIGKKWLREQLSKLGMLHLTNGGDTANKRIDWGIAKSHSNDAICITDLRPDTCEIKEWVIKPMRRQSKAKTDNVLGIKQRDLVEYTFMNGETHRGYVTALYPEQNALNFQSPTKNCKKVNARKCKVLWKYSKIYWLDNVS

SEQ ID NO: 23773 - protein, 408 aa, unidentified; identical to SEQ ID NO: 3792

SEQ ID NO: 23774 - protein, 401 aa, Sharpea sp.; identical to SEQ ID NO: 3798

SEQ ID NO: 23775 - protein, 413 aa, unidentified; identical to SEQ ID NO: 3290

SEQ ID NO: 23776 - protein, 413 aa, unidentified; identical to SEQ ID NO: 2636

SEQ ID NO: 23777 - protein, 413 aa, unidentified; identical to SEQ ID NO: 2636

SEQ ID NO: 23778 - protein, 413 aa, unidentified; identical to SEQ ID NO: 2605

SEQ ID NO: 23779 - protein, 413 aa, unidentified; identical to SEQ ID NO: 3587

SEQ ID NO: 23780 - protein, 413 aa, unidentified; identical to SEQ ID NO: 4011

SEQ ID NO: 23781 - protein, 413 aa, unidentified; identical to SEQ ID NO: 2636

SEQ ID NO: 23782 - protein, 413 aa, unidentified; identical to SEQ ID NO: 2605

SEQ ID NO: 23783 - protein, 413 aa, unidentified; identical to SEQ ID NO: 4044

SEQ ID NO: 23784 - protein, 413 aa, unidentified; identical to SEQ ID NO: 4088

SEQ ID NO: 23785 - protein, 347 aa, unidentified; identical to SEQ ID NO: 4100

SEQ ID NO: 23786 - protein, 413 aa, unidentified; identical to SEQ ID NO: 2636

SEQ ID NO: 23787 - protein, 413 aa, unidentified; identical to SEQ ID NO: 2636

SEQ ID NO: 23788 - protein, 413 aa, unidentified; identical to SEQ ID NO: 2636

SEQ ID NO: 23789 - protein, 413 aa, unidentified; identical to SEQ ID NO: 2636

SEQ ID NO: 23790 - protein, 359 aa, unidentified; identical to SEQ ID NO: 4400

SEQ ID NO: 23791 - protein, 413 aa, unidentified; identical to SEQ ID NO: 4409

SEQ ID NO: 23792 - protein, 413 aa, Erysipelotrichaceae sp.
MTSYAFVLDADNKQLAPTKEQKAWFLIRKKRATLLSRYPMVIQLKKKISDQEICKDEIRCGIDDGGLHVGVALVQKCQTRNKVIFKGTIEQRNDVKHLMDVRRGFRRYHRDHKRYRPVRFDNRKSSKRKGRIAPSILQKRQSTIRVINQLNKWVNITNYWLEDVAIDIRALTDGYKPYRWQYQKSNRLDENIRKAVILRDGCQCMECGKSNCRLEVHHIKPRRLKGSNTLGNLITLCTGCHQKTEGVEELYMNRYFALLNSSDNKNLNYAQHVMIGKKWLRKQLSNLGMLHLTNGGDTANKRIDWGIAKSHSNDAICITDLRPDTCEIKEWVIKPMRRQSKAKTDNVLGIKHRDLVEYTFMNGETHRGYVTALYPEQNVLNFQSPTKHCKKVNARKCKVLWKYSKIYWLDNVS

SEQ ID NO: 23793 - protein, 401 aa, unidentified; identical to SEQ ID NO: 4496

SEQ ID NO: 23794 - protein, 413 aa, unidentified; identical to SEQ ID NO: 2636

SEQ ID NO: 23795 - protein, 413 aa, unidentified; identical to SEQ ID NO: 4512

SEQ ID NO: 23796 - protein, 413 aa, unidentified; identical to SEQ ID NO: 2636

SEQ ID NO: 23797 - protein, 413 aa, unidentified; identical to SEQ ID NO: 3290

SEQ ID NO: 23798 - protein, 413 aa, unidentified; identical to SEQ ID NO: 2636

SEQ ID NO: 23799 - protein, 413 aa, unidentified; identical to SEQ ID NO: 2636

SEQ ID NO: 23800 - protein, 413 aa, unidentified; identical to SEQ ID NO: 3220

SEQ ID NO: 23801 - protein, 413 aa, unidentified; identical to SEQ ID NO: 2636

SEQ ID NO: 23802 - protein, 413 aa, unidentified; identical to SEQ ID NO: 4651

SEQ ID NO: 23803 - protein, 413 aa, unidentified; identical to SEQ ID NO: 4704

SEQ ID NO: 23804 - protein, 413 aa, unidentified; identical to SEQ ID NO: 4752

SEQ ID NO: 23805 - protein, 413 aa, unidentified; identical to SEQ ID NO: 4790

SEQ ID NO: 23806 - protein, 413 aa, unidentified; identical to SEQ ID NO: 3295

SEQ ID NO: 23807 - protein, 416 aa, unidentified; identical to SEQ ID NO: 4821

SEQ ID NO: 23808 - protein, 438 aa, unidentified; identical to SEQ ID NO: 4848

SEQ ID NO: 23809 - protein, 413 aa, unidentified; identical to SEQ ID NO: 4858

SEQ ID NO: 23810 - protein, 413 aa, unidentified; identical to SEQ ID NO: 2605

SEQ ID NO: 23811 - protein, 413 aa, unidentified; identical to SEQ ID NO: 2605

SEQ ID NO: 23812 - protein, 413 aa, Sharpea sp.; identical to SEQ ID NO: 4953

SEQ ID NO: 23813 - protein, 413 aa, unidentified; identical to SEQ ID NO: 2636

SEQ ID NO: 23814 - protein, 413 aa, unidentified; identical to SEQ ID NO: 2605

SEQ ID NO: 23815 - protein, 413 aa, unidentified; identical to SEQ ID NO: 3621

SEQ ID NO: 23816 - protein, 413 aa, unidentified; identical to SEQ ID NO: 3476

SEQ ID NO: 23817 - protein, 416 aa, unidentified; identical to SEQ ID NO: 5042

SEQ ID NO: 23818 - protein, 412 aa, unidentified; identical to SEQ ID NO: 5053

SEQ ID NO: 23819 - protein, 406 aa, unidentified; identical to SEQ ID NO: 5123

SEQ ID NO: 23820 - protein, 413 aa, unidentified; identical to SEQ ID NO: 3476

SEQ ID NO: 23821 - protein, 413 aa, unidentified; identical to SEQ ID NO: 2636

SEQ ID NO: 23822 - protein, 413 aa, Blautia sp.; identical to SEQ ID NO: 2636

SEQ ID NO: 23823 - protein, 413 aa, unidentified; identical to SEQ ID NO: 2636

SEQ ID NO: 23824 - protein, 413 aa, unidentified; identical to SEQ ID NO: 5199

SEQ ID NO: 23825 - protein, 412 aa, unidentified; identical to SEQ ID NO: 3155

SEQ ID NO: 23826 - protein, 413 aa, unidentified; identical to SEQ ID NO: 5215

SEQ ID NO: 23827 - protein, 413 aa, unidentified; identical to SEQ ID NO: 2636

SEQ ID NO: 23828 - protein, 413 aa, unidentified; identical to SEQ ID NO: 5263

SEQ ID NO: 23829 - protein, 408 aa, unidentified; identical to SEQ ID NO: 23737

SEQ ID NO: 23830 - protein, 418 aa, unidentified; identical to SEQ ID NO: 5338

SEQ ID NO: 23831 - protein, 413 aa, unidentified; identical to SEQ ID NO: 2605

SEQ ID NO: 23832 - protein, 413 aa, unidentified; identical to SEQ ID NO: 5348

SEQ ID NO: 23833 - protein, 413 aa, Blautia sp.; identical to SEQ ID NO: 5365

SEQ ID NO: 23834 - protein, 338 aa, unidentified; identical to SEQ ID NO: 5370

SEQ ID NO: 23835 - protein, 412 aa, unidentified; identical to SEQ ID NO: 3155

SEQ ID NO: 23836 - protein, 413 aa, unidentified; identical to SEQ ID NO: 2605

SEQ ID NO: 23837 - protein, 413 aa, unidentified; identical to SEQ ID NO: 2636

SEQ ID NO: 23838 - protein, 413 aa, unidentified; identical to SEQ ID NO: 5477

SEQ ID NO: 23839 - protein, 413 aa, unidentified; identical to SEQ ID NO: 2605

SEQ ID NO: 23840 - protein, 369 aa, unidentified; identical to SEQ ID NO: 5527

SEQ ID NO: 23841 - protein, 409 aa, unidentified; identical to SEQ ID NO: 5570

SEQ ID NO: 23842 - protein, 413 aa, unidentified; identical to SEQ ID NO: 2636

SEQ ID NO: 23843 - protein, 413 aa, unidentified; identical to SEQ ID NO: 2605

SEQ ID NO: 23844 - protein, 413 aa, unidentified; identical to SEQ ID NO: 2605

SEQ ID NO: 23845 - protein, 413 aa, unidentified; identical to SEQ ID NO: 5643

SEQ ID NO: 23846 - protein, 413 aa, unidentified; identical to SEQ ID NO: 3023

SEQ ID NO: 23847 - protein, 413 aa, unidentified; identical to SEQ ID NO: 5673

SEQ ID NO: 23848 - protein, 413 aa, unidentified; identical to SEQ ID NO: 2605

SEQ ID NO: 23849 - protein, 413 aa, unidentified; identical to SEQ ID NO: 3220

SEQ ID NO: 23850 - protein, 413 aa, unidentified; identical to SEQ ID NO: 2605

SEQ ID NO: 23851 - protein, 438 aa, unidentified; identical to SEQ ID NO: 4848

SEQ ID NO: 23852 - protein, 413 aa, unidentified; identical to SEQ ID NO: 2636

SEQ ID NO: 23853 - protein, 415 aa, unidentified; identical to SEQ ID NO: 5821

SEQ ID NO: 23854 - protein, 413 aa, unidentified; identical to SEQ ID NO: 2636

SEQ ID NO: 23855 - protein, 413 aa, unidentified; identical to SEQ ID NO: 3587

SEQ ID NO: 23856 - protein, 413 aa, unidentified; identical to SEQ ID NO: 2636

SEQ ID NO: 23857 - protein, 412 aa, unidentified; identical to SEQ ID NO: 3155

SEQ ID NO: 23858 - protein, 413 aa, unidentified; identical to SEQ ID NO: 5965

SEQ ID NO: 23859 - protein, 412 aa, unidentified; identical to SEQ ID NO: 5980

SEQ ID NO: 23860 - protein, 415 aa, unidentified; identical to SEQ ID NO: 6044

SEQ ID NO: 23861 - protein, 405 aa, unidentified; identical to SEQ ID NO: 6076

SEQ ID NO: 23862 - protein, 413 aa, unidentified; identical to SEQ ID NO: 3014

SEQ ID NO: 23863 - protein, 413 aa, unidentified; identical to SEQ ID NO: 2636

SEQ ID NO: 23864 - protein, 365 aa, unidentified; identical to SEQ ID NO: 6196

SEQ ID NO: 23865 - protein, 413 aa, unidentified; identical to SEQ ID NO: 2636

SEQ ID NO: 23866 - protein, 413 aa, unidentified; identical to SEQ ID NO: 2636

SEQ ID NO: 23867 - protein, 412 aa, unidentified; identical to SEQ ID NO: 6276

SEQ ID NO: 23868 - protein, 413 aa, unidentified; identical to SEQ ID NO: 6295

SEQ ID NO: 23869 - protein, 413 aa, unidentified; identical to SEQ ID NO: 6368

SEQ ID NO: 23870 - protein, 413 aa, unidentified; identical to SEQ ID NO: 3295

SEQ ID NO: 23871 - protein, 413 aa, unidentified; identical to SEQ ID NO: 6421

SEQ ID NO: 23872 - protein, 413 aa, unidentified; identical to SEQ ID NO: 3587

SEQ ID NO: 23873 - protein, 413 aa, unidentified; identical to SEQ ID NO: 2636

SEQ ID NO: 23874 - protein, 413 aa, unidentified; identical to SEQ ID NO: 3290

SEQ ID NO: 23875 - protein, 413 aa, unidentified; identical to SEQ ID NO: 3751

SEQ ID NO: 23876 - protein, 413 aa, unidentified; identical to SEQ ID NO: 6529

SEQ ID NO: 23877 - protein, 413 aa, unidentified; identical to SEQ ID NO: 2636

SEQ ID NO: 23878 - protein, 413 aa, unidentified; identical to SEQ ID NO: 2636

SEQ ID NO: 23879 - protein, 413 aa, unidentified; identical to SEQ ID NO: 2636

SEQ ID NO: 23880 - protein, 413 aa, unidentified; identical to SEQ ID NO: 2636

SEQ ID NO: 23881 - protein, 413 aa, unidentified; identical to SEQ ID NO: 3695

SEQ ID NO: 23882 - protein, 416 aa, unidentified; identical to SEQ ID NO: 6623

SEQ ID NO: 23883 - protein, 413 aa, unidentified; identical to SEQ ID NO: 3587

SEQ ID NO: 23884 - protein, 348 aa, unidentified; identical to SEQ ID NO: 6679

SEQ ID NO: 23885 - protein, 432 aa, Sharpea sp.; identical to SEQ ID NO: 6688

SEQ ID NO: 23886 - protein, 347 aa, unidentified; identical to SEQ ID NO: 4100

SEQ ID NO: 23887 - protein, 413 aa, unidentified; identical to SEQ ID NO: 2636

SEQ ID NO: 23888 - protein, 392 aa, unidentified; identical to SEQ ID NO: 6800

SEQ ID NO: 23889 - protein, 413 aa, unidentified; identical to SEQ ID NO: 2636

SEQ ID NO: 23890 - protein, 413 aa, unidentified; identical to SEQ ID NO: 6529

SEQ ID NO: 23891 - protein, 412 aa, unidentified; identical to SEQ ID NO: 6913

SEQ ID NO: 23892 - protein, 416 aa, unidentified; identical to SEQ ID NO: 6923

SEQ ID NO: 23893 - protein, 413 aa, unidentified; identical to SEQ ID NO: 2605

SEQ ID NO: 23894 - protein, 413 aa, unidentified; identical to SEQ ID NO: 2636

SEQ ID NO: 23895 - protein, 418 aa, unidentified; identical to SEQ ID NO: 7032

SEQ ID NO: 23896 - protein, 413 aa, unidentified; identical to SEQ ID NO: 7099

SEQ ID NO: 23897 - protein, 413 aa, unidentified; identical to SEQ ID NO: 7120

SEQ ID NO: 23898 - protein, 438 aa, unidentified; identical to SEQ ID NO: 4848

SEQ ID NO: 23899 - protein, 413 aa, unidentified; identical to SEQ ID NO: 3587

SEQ ID NO: 23900 - protein, 413 aa, unidentified; identical to SEQ ID NO: 2815

SEQ ID NO: 23901 - protein, 413 aa, unidentified; identical to SEQ ID NO: 7256

SEQ ID NO: 23902 - protein, 413 aa, unidentified; identical to SEQ ID NO: 5965

SEQ ID NO: 23903 - protein, 413 aa, unidentified; identical to SEQ ID NO: 2636

SEQ ID NO: 23904 - protein, 412 aa, unidentified; identical to SEQ ID NO: 3155

SEQ ID NO: 23905 - protein, 413 aa, unidentified; identical to SEQ ID NO: 7302

SEQ ID NO: 23906 - protein, 412 aa, unidentified; identical to SEQ ID NO: 6913

SEQ ID NO: 23907 - protein, 413 aa, unidentified; identical to SEQ ID NO: 2636

SEQ ID NO: 23908 - protein, 413 aa, unidentified; identical to SEQ ID NO: 2636

SEQ ID NO: 23909 - protein, 413 aa, unidentified; identical to SEQ ID NO: 5215

SEQ ID NO: 23910 - protein, 414 aa, Clostridium sp.
MTNYVFVIDANGKQLAPTKEQKAWYLIRKKGATLVNKYPMVIQLNKVIKDNNICKDEIRCGIDDGGLHVGIALIQRCQTKNKVLFKGTIEQRNDVKHLMQVRKKYRQYHRYHKRYRPARFNNRSSSKRQSRIAPSIFQKRQAIIRVINQLNKWINIKNYWLEDVSIDIRALTDGYKPYSWQYQKSNRLDENIRKAIILRDGCKCMECGKANCRLEVHHIKPRRLNGSNTIDNLIILCKKCHQKTEGKEELFMNKYFSLLGKSKDNKNLNYASHVMIGKNWLREQLSNLGELYLTNGGDTANKRIDWNIEKTHSNDAICITELKPDTTDIKDWIIKAMRRQSKAKTDNVLGIKHRDLVEYKYKNGEIHRGYVTALYPEIKALNFQSPTKHCKKVNARKCKLLWKYNKIYWLDNVN

SEQ ID NO: 23911 - protein, 413 aa, unidentified; identical to SEQ ID NO: 7540

SEQ ID NO: 23912 - protein, 413 aa, unidentified; identical to SEQ ID NO: 7541

SEQ ID NO: 23913 - protein, 413 aa, unidentified; identical to SEQ ID NO: 2636

SEQ ID NO: 23914 - protein, 413 aa, unidentified; identical to SEQ ID NO: 3220

SEQ ID NO: 23915 - protein, 413 aa, unidentified; identical to SEQ ID NO: 3295

SEQ ID NO: 23916 - protein, 416 aa, unidentified; identical to SEQ ID NO: 3087

SEQ ID NO: 23917 - protein, 413 aa, unidentified; identical to SEQ ID NO: 2636

SEQ ID NO: 23918 - protein, 411 aa, Clostridium sp.; identical to SEQ ID NO: 7735

SEQ ID NO: 23919 - protein, 413 aa, unidentified; identical to SEQ ID NO: 3476

SEQ ID NO: 23920 - protein, 413 aa, unidentified; identical to SEQ ID NO: 2636

SEQ ID NO: 23921 - protein, 416 aa, unidentified; identical to SEQ ID NO: 7785

SEQ ID NO: 23922 - protein, 413 aa, unidentified; identical to SEQ ID NO: 7120

SEQ ID NO: 23923 - protein, 413 aa, unidentified; identical to SEQ ID NO: 7841

SEQ ID NO: 23924 - protein, 413 aa, unidentified; identical to SEQ ID NO: 7847

SEQ ID NO: 23925 - protein, 413 aa, unidentified; identical to SEQ ID NO: 2636

SEQ ID NO: 23926 - protein, 413 aa, Blautia sp.; identical to SEQ ID NO: 5365

SEQ ID NO: 23927 - protein, 413 aa, Blautia sp.; identical to SEQ ID NO: 2636

SEQ ID NO: 23928 - protein, 413 aa, unidentified; identical to SEQ ID NO: 3695

SEQ ID NO: 23929 - protein, 413 aa, unidentified; identical to SEQ ID NO: 3119

SEQ ID NO: 23930 - protein, 413 aa, unidentified; identical to SEQ ID NO: 5215

SEQ ID NO: 23931 - protein, 413 aa, unidentified; identical to SEQ ID NO: 7980

SEQ ID NO: 23932 - protein, 413 aa, unidentified; identical to SEQ ID NO: 2636

SEQ ID NO: 23933 - protein, 413 aa, unidentified; identical to SEQ ID NO: 2636

SEQ ID NO: 23934 - protein, 413 aa, unidentified; identical to SEQ ID NO: 8048

SEQ ID NO: 23935 - protein, 413 aa, unidentified; identical to SEQ ID NO: 8063

SEQ ID NO: 23936 - protein, 438 aa, unidentified; identical to SEQ ID NO: 4848

SEQ ID NO: 23937 - protein, 413 aa, unidentified; identical to SEQ ID NO: 2636

SEQ ID NO: 23938 - protein, 413 aa, unidentified; identical to SEQ ID NO: 2636

SEQ ID NO: 23939 - protein, 413 aa, unidentified; identical to SEQ ID NO: 2636

SEQ ID NO: 23940 - protein, 413 aa, unidentified; identical to SEQ ID NO: 8144

SEQ ID NO: 23941 - protein, 413 aa, unidentified; identical to SEQ ID NO: 2636

SEQ ID NO: 23942 - protein, 413 aa, unidentified; identical to SEQ ID NO: 8203

SEQ ID NO: 23943 - protein, 413 aa, unidentified; identical to SEQ ID NO: 8063

SEQ ID NO: 23944 - protein, 413 aa, unidentified; identical to SEQ ID NO: 5215

SEQ ID NO: 23945 - protein, 413 aa, unidentified; identical to SEQ ID NO: 3587

SEQ ID NO: 23946 - protein, 413 aa, unidentified; identical to SEQ ID NO: 8255

SEQ ID NO: 23947 - protein, 413 aa, unidentified; identical to SEQ ID NO: 8260

SEQ ID NO: 23948 - protein, 413 aa, unidentified; identical to SEQ ID NO: 2636

SEQ ID NO: 23949 - protein, 361 aa, unidentified; identical to SEQ ID NO: 8295

SEQ ID NO: 23950 - protein, 413 aa, unidentified; identical to SEQ ID NO: 2636

SEQ ID NO: 23951 - protein, 413 aa, unidentified; identical to SEQ ID NO: 2636

SEQ ID NO: 23952 - protein, 413 aa, unidentified; identical to SEQ ID NO: 8345

SEQ ID NO: 23953 - protein, 413 aa, unidentified; identical to SEQ ID NO: 3290

SEQ ID NO: 23954 - protein, 413 aa, unidentified; identical to SEQ ID NO: 2636

SEQ ID NO: 23955 - protein, 413 aa, unidentified; identical to SEQ ID NO: 2636

SEQ ID NO: 23956 - protein, 413 aa, unidentified; identical to SEQ ID NO: 2636

SEQ ID NO: 23957 - protein, 413 aa, unidentified; identical to SEQ ID NO: 8396

SEQ ID NO: 23958 - protein, 413 aa, unidentified; identical to SEQ ID NO: 2636

SEQ ID NO: 23959 - protein, 413 aa, unidentified; identical to SEQ ID NO: 3476

SEQ ID NO: 23960 - protein, 413 aa, unidentified; identical to SEQ ID NO: 7541

SEQ ID NO: 23961 - protein, 413 aa, unidentified; identical to SEQ ID NO: 5215

SEQ ID NO: 23962 - protein, 413 aa, unidentified; identical to SEQ ID NO: 3295

SEQ ID NO: 23963 - protein, 413 aa, unidentified; identical to SEQ ID NO: 2815

SEQ ID NO: 23964 - protein, 413 aa, unidentified; identical to SEQ ID NO: 2636

SEQ ID NO: 23965 - protein, 413 aa, unidentified; identical to SEQ ID NO: 2858

SEQ ID NO: 23966 - protein, 413 aa, unidentified; identical to SEQ ID NO: 3476

SEQ ID NO: 23967 - protein, 413 aa, unidentified; identical to SEQ ID NO: 2636

SEQ ID NO: 23968 - protein, 433 aa, unidentified; identical to SEQ ID NO: 8543

SEQ ID NO: 23969 - protein, 413 aa, unidentified; identical to SEQ ID NO: 8553

SEQ ID NO: 23970 - protein, 413 aa, unidentified; identical to SEQ ID NO: 3220

SEQ ID NO: 23971 - protein, 413 aa, unidentified; identical to SEQ ID NO: 2636

SEQ ID NO: 23972 - protein, 413 aa, unidentified; identical to SEQ ID NO: 2636

SEQ ID NO: 23973 - protein, 413 aa, unidentified; identical to SEQ ID NO: 2636

SEQ ID NO: 23974 - protein, 413 aa, unidentified; identical to SEQ ID NO: 2636

SEQ ID NO: 23975 - protein, 414 aa, unidentified; identical to SEQ ID NO: 8775

SEQ ID NO: 23976 - protein, 412 aa, unidentified; identical to SEQ ID NO: 3155

SEQ ID NO: 23977 - protein, 413 aa, unidentified; identical to SEQ ID NO: 2636

SEQ ID NO: 23978 - protein, 413 aa, unidentified; identical to SEQ ID NO: 2636

SEQ ID NO: 23979 - protein, 413 aa, unidentified; identical to SEQ ID NO: 2636

SEQ ID NO: 23980 - protein, 413 aa, unidentified; identical to SEQ ID NO: 2636

SEQ ID NO: 23981 - protein, 413 aa, Blautia sp.; identical to SEQ ID NO: 2636

SEQ ID NO: 23982 - protein, 413 aa, unidentified; identical to SEQ ID NO: 3476

SEQ ID NO: 23983 - protein, 413 aa, unidentified; identical to SEQ ID NO: 2636

SEQ ID NO: 23984 - protein, 413 aa, unidentified; identical to SEQ ID NO: 4858

SEQ ID NO: 23985 - protein, 413 aa, unidentified; identical to SEQ ID NO: 2636

SEQ ID NO: 23986 - protein, 416 aa, unidentified; identical to SEQ ID NO: 8974

SEQ ID NO: 23987 - protein, 413 aa, unidentified; identical to SEQ ID NO: 2636

SEQ ID NO: 23988 - protein, 413 aa, unidentified; identical to SEQ ID NO: 8977
  source 1..413: note = Lachnospiraceae species

SEQ ID NO: 23989 - protein, 412 aa, unidentified; identical to SEQ ID NO: 8978

SEQ ID NO: 23990 - protein, 413 aa, unidentified; identical to SEQ ID NO: 9007

SEQ ID NO: 23991 - protein, 413 aa, unidentified; identical to SEQ ID NO: 3476

SEQ ID NO: 23992 - protein, 413 aa, unidentified; identical to SEQ ID NO: 2636

SEQ ID NO: 23993 - protein, 413 aa, unidentified; identical to SEQ ID NO: 2636

SEQ ID NO: 23994 - protein, 413 aa, unidentified; identical to SEQ ID NO: 2636

SEQ ID NO: 23995 - protein, 413 aa, unidentified; identical to SEQ ID NO: 5215

SEQ ID NO: 23996 - protein, 413 aa, unidentified; identical to SEQ ID NO: 9101

SEQ ID NO: 23997 - protein, 413 aa, unidentified; identical to SEQ ID NO: 2636

SEQ ID NO: 23998 - protein, 413 aa, unidentified; identical to SEQ ID NO: 9208

SEQ ID NO: 23999 - protein, 413 aa, unidentified; identical to SEQ ID NO: 9225

SEQ ID NO: 24000 - protein, 413 aa, unidentified; identical to SEQ ID NO: 9267

SEQ ID NO: 24001 - protein, 438 aa, unidentified; identical to SEQ ID NO: 4848

SEQ ID NO: 24002 - protein, 374 aa, unidentified; identical to SEQ ID NO: 9349

SEQ ID NO: 24003 - protein, 413 aa, unidentified; identical to SEQ ID NO: 3476

SEQ ID NO: 24004 - protein, 413 aa, unidentified; identical to SEQ ID NO: 9404

SEQ ID NO: 24005 - protein, 413 aa, unidentified; identical to SEQ ID NO: 2815

SEQ ID NO: 24006 - protein, 413 aa, unidentified; identical to SEQ ID NO: 2636

SEQ ID NO: 24007 - protein, 413 aa, unidentified; identical to SEQ ID NO: 2636

SEQ ID NO: 24008 - protein, 413 aa, unidentified; identical to SEQ ID NO: 2636

SEQ ID NO: 24009 - protein, 415 aa, unidentified; identical to SEQ ID NO: 6044

SEQ ID NO: 24010 - protein, 413 aa, unidentified; identical to SEQ ID NO: 8063

SEQ ID NO: 24011 - protein, 415 aa, unidentified; identical to SEQ ID NO: 3548

SEQ ID NO: 24012 - protein, 413 aa, unidentified; identical to SEQ ID NO: 9509

SEQ ID NO: 24013 - protein, 413 aa, unidentified; identical to SEQ ID NO: 2636

SEQ ID NO: 24014 - protein, 413 aa, unidentified; identical to SEQ ID NO: 2636

SEQ ID NO: 24015 - protein, 413 aa, unidentified; identical to SEQ ID NO: 3476

SEQ ID NO: 24016 - protein, 413 aa, unidentified; identical to SEQ ID NO: 2636

SEQ ID NO: 24017 - protein, 413 aa, unidentified; identical to SEQ ID NO: 9225

SEQ ID NO: 24018 - protein, 413 aa, unidentified; identical to SEQ ID NO: 9544

SEQ ID NO: 24019 - protein, 413 aa, unidentified; identical to SEQ ID NO: 5215

SEQ ID NO: 24020 - protein, 413 aa, unidentified; identical to SEQ ID NO: 3220

SEQ ID NO: 24021 - protein, 413 aa, unidentified; identical to SEQ ID NO: 2636

SEQ ID NO: 24022 - protein, 413 aa, unidentified; identical to SEQ ID NO: 9577

SEQ ID NO: 24023 - protein, 415 aa, unidentified; identical to SEQ ID NO: 9591

SEQ ID NO: 24024 - protein, 413 aa, unidentified; identical to SEQ ID NO: 9603

SEQ ID NO: 24025 - protein, 412 aa, Coprococcus sp.; identical to SEQ ID NO: 9618

SEQ ID NO: 24026 - protein, 413 aa, unidentified; identical to SEQ ID NO: 9603

SEQ ID NO: 24027 - protein, 413 aa, unidentified; identical to SEQ ID NO: 2636

SEQ ID NO: 24028 - protein, 413 aa, unidentified; identical to SEQ ID NO: 2636

SEQ ID NO: 24029 - protein, 415 aa, unidentified; identical to SEQ ID NO: 9638

SEQ ID NO: 24030 - protein, 413 aa, unidentified; identical to SEQ ID NO: 2636

SEQ ID NO: 24031 - protein, 413 aa, unidentified; identical to SEQ ID NO: 2636

SEQ ID NO: 24032 - protein, 413 aa, unidentified; identical to SEQ ID NO: 2636

SEQ ID NO: 24033 - protein, 413 aa, unidentified; identical to SEQ ID NO: 9710

SEQ ID NO: 24034 - protein, 416 aa, unidentified; identical to SEQ ID NO: 9717

SEQ ID NO: 24035 - protein, 413 aa, unidentified; identical to SEQ ID NO: 9776

SEQ ID NO: 24036 - protein, 413 aa, unidentified; identical to SEQ ID NO: 2636

SEQ ID NO: 24037 - protein, 413 aa, unidentified; identical to SEQ ID NO: 2636

SEQ ID NO: 24038 - protein, 413 aa, unidentified; identical to SEQ ID NO: 9603

SEQ ID NO: 24039 - protein, 413 aa, unidentified; identical to SEQ ID NO: 2636

SEQ ID NO: 24040 - protein, 413 aa, unidentified; identical to SEQ ID NO: 9864

SEQ ID NO: 24041 - protein, 413 aa, unidentified; identical to SEQ ID NO: 9873

SEQ ID NO: 24042 - protein, 413 aa, unidentified; identical to SEQ ID NO: 9883

SEQ ID NO: 24043 - protein, 413 aa, unidentified; identical to SEQ ID NO: 2636

SEQ ID NO: 24044 - protein, 413 aa, unidentified; identical to SEQ ID NO: 2636

SEQ ID NO: 24045 - protein, 413 aa, unidentified; identical to SEQ ID NO: 2636

SEQ ID NO: 24046 - protein, 413 aa, unidentified; identical to SEQ ID NO: 2636

SEQ ID NO: 24047 - protein, 413 aa, unidentified; identical to SEQ ID NO: 9950

SEQ ID NO: 24048 - protein, 413 aa, unidentified; identical to SEQ ID NO: 2636

SEQ ID NO: 24049 - protein, 413 aa, unidentified; identical to SEQ ID NO: 7541

SEQ ID NO: 24050 - protein, 413 aa, unidentified; identical to SEQ ID NO: 4790

SEQ ID NO: 24051 - protein, 414 aa, unidentified; identical to SEQ ID NO: 10015

SEQ ID NO: 24052 - protein, 413 aa, unidentified; identical to SEQ ID NO: 2636

SEQ ID NO: 24053 - protein, 413 aa, unidentified; identical to SEQ ID NO: 10057

SEQ ID NO: 24054 - protein, 413 aa, unidentified; identical to SEQ ID NO: 2636

SEQ ID NO: 24055 - protein, 413 aa, unidentified; identical to SEQ ID NO: 2636

SEQ ID NO: 24056 - protein, 413 aa, unidentified; identical to SEQ ID NO: 2636

SEQ ID NO: 24057 - protein, 413 aa, unidentified; identical to SEQ ID NO: 2636

SEQ ID NO: 24058 - protein, 413 aa, unidentified; identical to SEQ ID NO: 2636

SEQ ID NO: 24059 - protein, 432 aa, unidentified; identical to SEQ ID NO: 10248

SEQ ID NO: 24060 - protein, 413 aa, unidentified; identical to SEQ ID NO: 3220

SEQ ID NO: 24061 - protein, 413 aa, unidentified; identical to SEQ ID NO: 2636

SEQ ID NO: 24062 - protein, 413 aa, unidentified; identical to SEQ ID NO: 7541

SEQ ID NO: 24063 - protein, 413 aa, unidentified; identical to SEQ ID NO: 2636

SEQ ID NO: 24064 - protein, 413 aa, unidentified; identical to SEQ ID NO: 2636

SEQ ID NO: 24065 - protein, 413 aa, unidentified; identical to SEQ ID NO: 10403

SEQ ID NO: 24066 - protein, 413 aa, unidentified; identical to SEQ ID NO: 2636

SEQ ID NO: 24067 - protein, 413 aa, unidentified; identical to SEQ ID NO: 2636

SEQ ID NO: 24068 - protein, 413 aa, unidentified; identical to SEQ ID NO: 10449

SEQ ID NO: 24069 - protein, 413 aa, unidentified; identical to SEQ ID NO: 10467

SEQ ID NO: 24070 - protein, 413 aa, unidentified; identical to SEQ ID NO: 2636

SEQ ID NO: 24071 - protein, 413 aa, unidentified; identical to SEQ ID NO: 2636

SEQ ID NO: 24072 - protein, 413 aa, unidentified; identical to SEQ ID NO: 7541

SEQ ID NO: 24073 - protein, 412 aa, unidentified; identical to SEQ ID NO: 10534

SEQ ID NO: 24074 - protein, 415 aa, Clostridium sp.; identical to SEQ ID NO: 10543

SEQ ID NO: 24075 - protein, 413 aa, unidentified; identical to SEQ ID NO: 2636

SEQ ID NO: 24076 - protein, 416 aa, unidentified; identical to SEQ ID NO: 10554

SEQ ID NO: 24077 - protein, 413 aa, unidentified; identical to SEQ ID NO: 3616

SEQ ID NO: 24078 - protein, 413 aa, unidentified; identical to SEQ ID NO: 3587

SEQ ID NO: 24079 - protein, 413 aa, unidentified; identical to SEQ ID NO: 2636

SEQ ID NO: 24080 - protein, 413 aa, unidentified; identical to SEQ ID NO: 2636

SEQ ID NO: 24081 - protein, 413 aa, unidentified; identical to SEQ ID NO: 2636

SEQ ID NO: 24082 - protein, 413 aa, unidentified; identical to SEQ ID NO: 10591

SEQ ID NO: 24083 - protein, 413 aa, unidentified; identical to SEQ ID NO: 2636

SEQ ID NO: 24084 - protein, 374 aa, unidentified; identical to SEQ ID NO: 10634

SEQ ID NO: 24085 - protein, 413 aa, unidentified; identical to SEQ ID NO: 10655

SEQ ID NO: 24086 - protein, 413 aa, unidentified; identical to SEQ ID NO: 2636

SEQ ID NO: 24087 - protein, 413 aa, unidentified; identical to SEQ ID NO: 3290

SEQ ID NO: 24088 - protein, 413 aa, unidentified; identical to SEQ ID NO: 2636

SEQ ID NO: 24089 - protein, 413 aa, Blautia sp.; identical to SEQ ID NO: 3119

SEQ ID NO: 24090 - protein, 413 aa, unidentified; identical to SEQ ID NO: 2636

SEQ ID NO: 24091 - protein, 413 aa, unidentified; identical to SEQ ID NO: 2636

SEQ ID NO: 24092 - protein, 413 aa, unidentified; identical to SEQ ID NO: 2636

SEQ ID NO: 24093 - protein, 413 aa, unidentified; identical to SEQ ID NO: 7541

SEQ ID NO: 24094 - protein, 413 aa, unidentified; identical to SEQ ID NO: 10778

SEQ ID NO: 24095 - protein, 413 aa, unidentified; identical to SEQ ID NO: 10785

SEQ ID NO: 24096 - protein, 413 aa, unidentified; identical to SEQ ID NO: 3476

SEQ ID NO: 24097 - protein, 397 aa, unidentified; identical to SEQ ID NO: 10847

SEQ ID NO: 24098 - protein, 432 aa, unidentified; identical to SEQ ID NO: 10851

SEQ ID NO: 24099 - protein, 413 aa, unidentified; identical to SEQ ID NO: 10896

SEQ ID NO: 24100 - protein, 413 aa, unidentified; identical to SEQ ID NO: 10950

SEQ ID NO: 24101 - protein, 401 aa, unidentified; identical to SEQ ID NO: 3798
  source 1..401: note = Sharpea sp.

SEQ ID NO: 24102 - protein, 413 aa, unidentified; identical to SEQ ID NO: 6529

SEQ ID NO: 24103 - protein, 413 aa, unidentified; identical to SEQ ID NO: 11000

SEQ ID NO: 24104 - protein, 413 aa, unidentified; identical to SEQ ID NO: 2636

SEQ ID NO: 24105 - protein, 413 aa, unidentified; identical to SEQ ID NO: 11048

SEQ ID NO: 24106 - protein, 413 aa, Blautia sp.; identical to SEQ ID NO: 3616

SEQ ID NO: 24107 - protein, 413 aa, unidentified; identical to SEQ ID NO: 3295

SEQ ID NO: 24108 - protein, 413 aa, unidentified; identical to SEQ ID NO: 2636

SEQ ID NO: 24109 - protein, 413 aa, unidentified; identical to SEQ ID NO: 11100

SEQ ID NO: 24110 - protein, 413 aa, unidentified; identical to SEQ ID NO: 2636

SEQ ID NO: 24111 - protein, 413 aa, unidentified; identical to SEQ ID NO: 2636

SEQ ID NO: 24112 - protein, 374 aa, unidentified; identical to SEQ ID NO: 11229

SEQ ID NO: 24113 - protein, 413 aa, unidentified; identical to SEQ ID NO: 11236

SEQ ID NO: 24114 - protein, 413 aa, unidentified; identical to SEQ ID NO: 2636

SEQ ID NO: 24115 - protein, 413 aa, unidentified; identical to SEQ ID NO: 11242

SEQ ID NO: 24116 - protein, 413 aa, unidentified; identical to SEQ ID NO: 3220

SEQ ID NO: 24117 - protein, 354 aa, unidentified; identical to SEQ ID NO: 11254

SEQ ID NO: 24118 - protein, 415 aa, unidentified; identical to SEQ ID NO: 3548

SEQ ID NO: 24119 - protein, 413 aa, unidentified; identical to SEQ ID NO: 3587

SEQ ID NO: 24120 - protein, 413 aa, unidentified; identical to SEQ ID NO: 2636

SEQ ID NO: 24121 - protein, 437 aa, unidentified; identical to SEQ ID NO: 11424

SEQ ID NO: 24122 - protein, 413 aa, unidentified; identical to SEQ ID NO: 11449

SEQ ID NO: 24123 - protein, 413 aa, unidentified; identical to SEQ ID NO: 5215

SEQ ID NO: 24124 - protein, 413 aa, unidentified; identical to SEQ ID NO: 2636

SEQ ID NO: 24125 - protein, 413 aa, unidentified; identical to SEQ ID NO: 2636

SEQ ID NO: 24126 - protein, 413 aa, unidentified; identical to SEQ ID NO: 2636

SEQ ID NO: 24127 - protein, 413 aa, unidentified; identical to SEQ ID NO: 11523

SEQ ID NO: 24128 - protein, 413 aa, unidentified; identical to SEQ ID NO: 2636

SEQ ID NO: 24129 - protein, 374 aa, unidentified; identical to SEQ ID NO: 11546

SEQ ID NO: 24130 - protein, 416 aa, unidentified; identical to SEQ ID NO: 7785

SEQ ID NO: 24131 - protein, 413 aa, unidentified; identical to SEQ ID NO: 10655

SEQ ID NO: 24132 - protein, 413 aa, unidentified; identical to SEQ ID NO: 2636

SEQ ID NO: 24133 - protein, 415 aa, unidentified; identical to SEQ ID NO: 11584

SEQ ID NO: 24134 - protein, 413 aa, unidentified; identical to SEQ ID NO: 2636

SEQ ID NO: 24135 - protein, 413 aa, unidentified; identical to SEQ ID NO: 2636

SEQ ID NO: 24136 - protein, 413 aa, unidentified; identical to SEQ ID NO: 2636

SEQ ID NO: 24137 - protein, 413 aa, Blautia sp.; identical to SEQ ID NO: 3290

SEQ ID NO: 24138 - protein, 413 aa, unidentified; identical to SEQ ID NO: 2636

SEQ ID NO: 24139 - protein, 413 aa, unidentified; identical to SEQ ID NO: 11717

SEQ ID NO: 24140 - protein, 416 aa, unidentified; identical to SEQ ID NO: 11728

SEQ ID NO: 24141 - protein, 413 aa, unidentified; identical to SEQ ID NO: 2636

SEQ ID NO: 24142 - protein, 413 aa, unidentified; identical to SEQ ID NO: 11757

SEQ ID NO: 24143 - protein, 413 aa, unidentified; identical to SEQ ID NO: 11784

SEQ ID NO: 24144 - protein, 413 aa, unidentified; identical to SEQ ID NO: 2636

SEQ ID NO: 24145 - protein, 413 aa, unidentified; identical to SEQ ID NO: 11796

SEQ ID NO: 24146 - protein, 413 aa, Blautia sp.; identical to SEQ ID NO: 3119

SEQ ID NO: 24147 - protein, 413 aa, unidentified; identical to SEQ ID NO: 4651

SEQ ID NO: 24148 - protein, 416 aa, unidentified; identical to SEQ ID NO: 11813

SEQ ID NO: 24149 - protein, 413 aa, unidentified; identical to SEQ ID NO: 2636

SEQ ID NO: 24150 - protein, 413 aa, unidentified; identical to SEQ ID NO: 2636

SEQ ID NO: 24151 - protein, 415 aa, unidentified; identical to SEQ ID NO: 11853

SEQ ID NO: 24152 - protein, 413 aa, unidentified; identical to SEQ ID NO: 3220

SEQ ID NO: 24153 - protein, 415 aa, unidentified; identical to SEQ ID NO: 11876

SEQ ID NO: 24154 - protein, 413 aa, unidentified; identical to SEQ ID NO: 4790

SEQ ID NO: 24155 - protein, 413 aa, unidentified; identical to SEQ ID NO: 2815

SEQ ID NO: 24156 - protein, 412 aa, unidentified; identical to SEQ ID NO: 11932

SEQ ID NO: 24157 - protein, 413 aa, unidentified; identical to SEQ ID NO: 11940

SEQ ID NO: 24158 - protein, 413 aa, unidentified; identical to SEQ ID NO: 3023

SEQ ID NO: 24159 - protein, 415 aa, unidentified; identical to SEQ ID NO: 11973

SEQ ID NO: 24160 - protein, 413 aa, unidentified; identical to SEQ ID NO: 11978

SEQ ID NO: 24161 - protein, 413 aa, unidentified; identical to SEQ ID NO: 2636

SEQ ID NO: 24162 - protein, 413 aa, unidentified; identical to SEQ ID NO: 12039

SEQ ID NO: 24163 - protein, 413 aa, unidentified; identical to SEQ ID NO: 3220

SEQ ID NO: 24164 - protein, 413 aa, unidentified; identical to SEQ ID NO: 3616

SEQ ID NO: 24165 - protein, 412 aa, unidentified; identical to SEQ ID NO: 8978

SEQ ID NO: 24166 - protein, 413 aa, unidentified; identical to SEQ ID NO: 2636

SEQ ID NO: 24167 - protein, 413 aa, unidentified; identical to SEQ ID NO: 12220

SEQ ID NO: 24168 - protein, 415 aa, unidentified; identical to SEQ ID NO: 11876

SEQ ID NO: 24169 - protein, 413 aa, unidentified; identical to SEQ ID NO: 12223

SEQ ID NO: 24170 - protein, 413 aa, unidentified; identical to SEQ ID NO: 3023

SEQ ID NO: 24171 - protein, 413 aa, unidentified; identical to SEQ ID NO: 2636

SEQ ID NO: 24172 - protein, 413 aa, unidentified; identical to SEQ ID NO: 8345

SEQ ID NO: 24173 - protein, 413 aa, unidentified; identical to SEQ ID NO: 3476

SEQ ID NO: 24174 - protein, 413 aa, unidentified; identical to SEQ ID NO: 4790

SEQ ID NO: 24175 - protein, 413 aa, unidentified; identical to SEQ ID NO: 2636

SEQ ID NO: 24176 - protein, 413 aa, unidentified; identical to SEQ ID NO: 2636

SEQ ID NO: 24177 - protein, 378 aa, unidentified; identical to SEQ ID NO: 12349

SEQ ID NO: 24178 - protein, 407 aa, unidentified; identical to SEQ ID NO: 12361

SEQ ID NO: 24179 - protein, 438 aa, unidentified; identical to SEQ ID NO: 12384

SEQ ID NO: 24180 - protein, 413 aa, unidentified; identical to SEQ ID NO: 12390

SEQ ID NO: 24181 - protein, 438 aa, unidentified; identical to SEQ ID NO: 4848

SEQ ID NO: 24182 - protein, 415 aa, unidentified; identical to SEQ ID NO: 10543

SEQ ID NO: 24183 - protein, 413 aa, unidentified; identical to SEQ ID NO: 12452

SEQ ID NO: 24184 - protein, 413 aa, unidentified; identical to SEQ ID NO: 6529

SEQ ID NO: 24185 - protein, 413 aa, unidentified; identical to SEQ ID NO: 12513

SEQ ID NO: 24186 - protein, 413 aa, unidentified; identical to SEQ ID NO: 2636

SEQ ID NO: 24187 - protein, 413 aa, unidentified; identical to SEQ ID NO: 3476

SEQ ID NO: 24188 - protein, 413 aa, Blautia sp.; identical to SEQ ID NO: 3290

SEQ ID NO: 24189 - protein, 413 aa, unidentified; identical to SEQ ID NO: 3587

SEQ ID NO: 24190 - protein, 412 aa, unidentified; identical to SEQ ID NO: 3738
  source 1..412: note = Deinococcus sp.

SEQ ID NO: 24191 - protein, 413 aa, unidentified; identical to SEQ ID NO: 2636

SEQ ID NO: 24192 - protein, 413 aa, unidentified; identical to SEQ ID NO: 4953
  source 1..413: note = Sharpea sp.

SEQ ID NO: 24193 - protein, 413 aa, unidentified; identical to SEQ ID NO: 3023

SEQ ID NO: 24194 - protein, 410 aa, unidentified; identical to SEQ ID NO: 12646

SEQ ID NO: 24195 - protein, 413 aa, unidentified; identical to SEQ ID NO: 3290

SEQ ID NO: 24196 - protein, 413 aa, unidentified; identical to SEQ ID NO: 3295

SEQ ID NO: 24197 - protein, 374 aa, unidentified; identical to SEQ ID NO: 12692

SEQ ID NO: 24198 - protein, 412 aa, unidentified; identical to SEQ ID NO: 6913

SEQ ID NO: 24199 - protein, 413 aa, unidentified; identical to SEQ ID NO: 2636

SEQ ID NO: 24200 - protein, 413 aa, unidentified; identical to SEQ ID NO: 2636

SEQ ID NO: 24201 - protein, 413 aa, unidentified; identical to SEQ ID NO: 2636

SEQ ID NO: 24202 - protein, 413 aa, unidentified; identical to SEQ ID NO: 3023

SEQ ID NO: 24203 - protein, 413 aa, unidentified; identical to SEQ ID NO: 12823

SEQ ID NO: 24204 - protein, 413 aa, unidentified; identical to SEQ ID NO: 10591

SEQ ID NO: 24205 - protein, 413 aa, unidentified; identical to SEQ ID NO: 2636

SEQ ID NO: 24206 - protein, 438 aa, unidentified; identical to SEQ ID NO: 4848

SEQ ID NO: 24207 - protein, 413 aa, unidentified; identical to SEQ ID NO: 12877

SEQ ID NO: 24208 - protein, 413 aa, unidentified; identical to SEQ ID NO: 7099

SEQ ID NO: 24209 - protein, 413 aa, unidentified; identical to SEQ ID NO: 11236

SEQ ID NO: 24210 - protein, 411 aa, unidentified; identical to SEQ ID NO: 2867

SEQ ID NO: 24211 - protein, 413 aa, unidentified; identical to SEQ ID NO: 12915
  source 1..413: note = Lachnospiraceae bacterium

SEQ ID NO: 24212 - protein, 413 aa, unidentified; identical to SEQ ID NO: 10403

SEQ ID NO: 24213 - protein, 413 aa, unidentified; identical to SEQ ID NO: 2636

SEQ ID NO: 24214 - protein, 413 aa, unidentified; identical to SEQ ID NO: 2636

SEQ ID NO: 24215 - protein, 413 aa, unidentified; identical to SEQ ID NO: 5215

SEQ ID NO: 24216 - protein, 413 aa, unidentified; identical to SEQ ID NO: 3621

SEQ ID NO: 24217 - protein, 413 aa, Blautia sp.; identical to SEQ ID NO: 3476

SEQ ID NO: 24218 - protein, 413 aa, unidentified; identical to SEQ ID NO: 2636

SEQ ID NO: 24219 - protein, 413 aa, unidentified; identical to SEQ ID NO: 2605

SEQ ID NO: 24220 - protein, 413 aa, unidentified; identical to SEQ ID NO: 13176

SEQ ID NO: 24221 - protein, 413 aa, synthetic construct; identical to SEQ ID NO: 2636

SEQ ID NO: 24222 - protein, 413 aa, synthetic construct; identical to SEQ ID NO: 13291

SEQ ID NO: 24223 - protein, 413 aa, synthetic construct; identical to SEQ ID NO: 2636

SEQ ID NO: 24224 - protein, 413 aa, Blautia sp.; identical to SEQ ID NO: 9603

SEQ ID NO: 24225 - protein, 413 aa, synthetic construct; identical to SEQ ID NO: 3220

SEQ ID NO: 24226 - protein, 413 aa, synthetic construct; identical to SEQ ID NO: 2636

SEQ ID NO: 24227 - protein, 422 aa, synthetic construct; identical to SEQ ID NO: 13422

SEQ ID NO: 24228 - protein, 413 aa, synthetic construct; identical to SEQ ID NO: 2636

SEQ ID NO: 24229 - protein, 410 aa, synthetic construct; identical to SEQ ID NO: 13480

SEQ ID NO: 24230 - protein, 412 aa, synthetic construct; identical to SEQ ID NO: 6276

SEQ ID NO: 24231 - protein, 413 aa, synthetic construct; identical to SEQ ID NO: 13517

SEQ ID NO: 24232 - protein, 413 aa, synthetic construct; identical to SEQ ID NO: 10467

SEQ ID NO: 24233 - protein, 413 aa, synthetic construct; identical to SEQ ID NO: 11784

SEQ ID NO: 24234 - protein, 413 aa, synthetic construct; identical to SEQ ID NO: 3476

SEQ ID NO: 24235 - protein, 438 aa, synthetic construct; identical to SEQ ID NO: 4848

SEQ ID NO: 24236 - protein, 380 aa, unidentified; identical to SEQ ID NO: 13675
  source 1..380: note = isolate Kandleria sp. UBA4329

SEQ ID NO: 24237 - protein, 413 aa, synthetic construct; identical to SEQ ID NO: 4790

SEQ ID NO: 24238 - protein, 409 aa, synthetic construct; identical to SEQ ID NO: 13747

SEQ ID NO: 24239 - protein, 413 aa, synthetic construct; identical to SEQ ID NO: 2636

SEQ ID NO: 24240 - protein, 438 aa, synthetic construct; identical to SEQ ID NO: 4848

SEQ ID NO: 24241 - protein, 415 aa, synthetic construct; identical to SEQ ID NO: 6044

SEQ ID NO: 24242 - protein, 415 aa, synthetic construct; identical to SEQ ID NO: 5821

SEQ ID NO: 24243 - protein, 413 aa, synthetic construct; identical to SEQ ID NO: 13902

SEQ ID NO: 24244 - protein, 413 aa, synthetic construct; identical to SEQ ID NO: 2636

SEQ ID NO: 24245 - protein, 412 aa, synthetic construct; identical to SEQ ID NO: 6913

SEQ ID NO: 24246 - protein, 413 aa, synthetic construct; identical to SEQ ID NO: 5965

SEQ ID NO: 24247 - protein, 413 aa, synthetic construct; identical to SEQ ID NO: 14027

SEQ ID NO: 24248 - protein, 413 aa, synthetic construct; identical to SEQ ID NO: 3220

SEQ ID NO: 24249 - protein, 413 aa, synthetic construct; identical to SEQ ID NO: 2636

SEQ ID NO: 24250 - protein, 412 aa, synthetic construct; identical to SEQ ID NO: 6913

SEQ ID NO: 24251 - protein, 413 aa, unidentified; identical to SEQ ID NO: 2636

SEQ ID NO: 24252 - protein, 413 aa, synthetic construct; identical to SEQ ID NO: 12039

SEQ ID NO: 24253 - protein, 413 aa, synthetic construct; identical to SEQ ID NO: 14141

SEQ ID NO: 24254 - protein, 416 aa, synthetic construct; identical to SEQ ID NO: 14152

SEQ ID NO: 24255 - protein, 438 aa, synthetic construct; identical to SEQ ID NO: 14156

SEQ ID NO: 24256 - protein, 413 aa, synthetic construct; identical to SEQ ID NO: 2636

SEQ ID NO: 24257 - protein, 413 aa, synthetic construct; identical to SEQ ID NO: 14184

SEQ ID NO: 24258 - protein, 413 aa, synthetic construct; identical to SEQ ID NO: 3587

SEQ ID NO: 24259 - protein, 413 aa, synthetic construct; identical to SEQ ID NO: 14237

SEQ ID NO: 24260 - protein, 413 aa, synthetic construct; identical to SEQ ID NO: 2636

SEQ ID NO: 24261 - protein, 413 aa, synthetic construct; identical to SEQ ID NO: 8345

SEQ ID NO: 24262 - protein, 415 aa, synthetic construct; identical to SEQ ID NO: 14316

SEQ ID NO: 24263 - protein, 416 aa, synthetic construct; identical to SEQ ID NO: 14330

SEQ ID NO: 24264 - protein, 413 aa, synthetic construct; identical to SEQ ID NO: 3476

SEQ ID NO: 24265 - protein, 413 aa, synthetic construct; identical to SEQ ID NO: 3695

SEQ ID NO: 24266 - protein, 413 aa, Blautia sp.; identical to SEQ ID NO: 3476

SEQ ID NO: 24267 - protein, 415 aa, synthetic construct; identical to SEQ ID NO: 10543

SEQ ID NO: 24268 - protein, 411 aa, Clostridium sp.; identical to SEQ ID NO: 7735

SEQ ID NO: 24269 - protein, 438 aa, synthetic construct; identical to SEQ ID NO: 14647

SEQ ID NO: 24270 - protein, 413 aa, synthetic construct; identical to SEQ ID NO: 14648

SEQ ID NO: 24271 - protein, 416 aa, synthetic construct; identical to SEQ ID NO: 6623

SEQ ID NO: 24272 - protein, 380 aa, synthetic construct; identical to SEQ ID NO: 14713

SEQ ID NO: 24273 - protein, 413 aa, synthetic construct; identical to SEQ ID NO: 8260

SEQ ID NO: 24274 - protein, 416 aa, synthetic construct; identical to SEQ ID NO: 6623

SEQ ID NO: 24275 - protein, 413 aa, synthetic construct; identical to SEQ ID NO: 2605

SEQ ID NO: 24276 - protein, 413 aa, synthetic construct; identical to SEQ ID NO: 14876

SEQ ID NO: 24277 - protein, 413 aa, synthetic construct; identical to SEQ ID NO: 3587

SEQ ID NO: 24278 - protein, 412 aa, unidentified; identical to SEQ ID NO: 9618
  source 1..412: note = Coprococcus sp.

SEQ ID NO: 24279 - protein, 413 aa, synthetic construct; identical to SEQ ID NO: 2636

SEQ ID NO: 24280 - protein, 413 aa, synthetic construct; identical to SEQ ID NO: 3616

SEQ ID NO: 24281 - protein, 438 aa, synthetic construct; identical to SEQ ID NO: 4848

SEQ ID NO: 24282 - protein, 413 aa, Blautia sp.; identical to SEQ ID NO: 10403

SEQ ID NO: 24283 - protein, 413 aa, synthetic construct; identical to SEQ ID NO: 15151

SEQ ID NO: 24284 - protein, 412 aa, synthetic construct; identical to SEQ ID NO: 15155

SEQ ID NO: 24285 - protein, 413 aa, synthetic construct; identical to SEQ ID NO: 15157

SEQ ID NO: 24286 - protein, 405 aa, synthetic construct; identical to SEQ ID NO: 15158

SEQ ID NO: 24287 - protein, 438 aa, synthetic construct; identical to SEQ ID NO: 4848

SEQ ID NO: 24288 - protein, 413 aa, synthetic construct; identical to SEQ ID NO: 15240

SEQ ID NO: 24289 - protein, 375 aa, synthetic construct; identical to SEQ ID NO: 15243

SEQ ID NO: 24290 - protein, 413 aa, synthetic construct; identical to SEQ ID NO: 3119

SEQ ID NO: 24291 - protein, 413 aa, synthetic construct; identical to SEQ ID NO: 2605

SEQ ID NO: 24292 - protein, 413 aa, synthetic construct; identical to SEQ ID NO: 3220

SEQ ID NO: 24293 - protein, 411 aa, synthetic construct; identical to SEQ ID NO: 2867

SEQ ID NO: 24294 - protein, 438 aa, synthetic construct; identical to SEQ ID NO: 4848

SEQ ID NO: 24295 - protein, 413 aa, synthetic construct; identical to SEQ ID NO: 15509

SEQ ID NO: 24296 - protein, 413 aa, synthetic construct; identical to SEQ ID NO: 3220

SEQ ID NO: 24297 - protein, 413 aa, synthetic construct; identical to SEQ ID NO: 12513

SEQ ID NO: 24298 - protein, 415 aa, synthetic construct; identical to SEQ ID NO: 10543

SEQ ID NO: 24299 - protein, 413 aa, synthetic construct; identical to SEQ ID NO: 2636

SEQ ID NO: 24300 - protein, 413 aa, synthetic construct; identical to SEQ ID NO: 3220

SEQ ID NO: 24301 - protein, 413 aa, synthetic construct; identical to SEQ ID NO: 15854

SEQ ID NO: 24302 - protein, 413 aa, synthetic construct; identical to SEQ ID NO: 2636

SEQ ID NO: 24303 - protein, 413 aa, synthetic construct; identical to SEQ ID NO: 12223

SEQ ID NO: 24304 - protein, 415 aa, synthetic construct; identical to SEQ ID NO: 15940

SEQ ID NO: 24305 - protein, 412 aa, synthetic construct; identical to SEQ ID NO: 3155

SEQ ID NO: 24306 - protein, 413 aa, synthetic construct; identical to SEQ ID NO: 16077

SEQ ID NO: 24307 - protein, 411 aa, synthetic construct; identical to SEQ ID NO: 16081

SEQ ID NO: 24308 - protein, 413 aa, synthetic construct; identical to SEQ ID NO: 3290

SEQ ID NO: 24309 - protein, 413 aa, synthetic construct; identical to SEQ ID NO: 3476

SEQ ID NO: 24310 - protein, 413 aa, synthetic construct; identical to SEQ ID NO: 16315

SEQ ID NO: 24311 - protein, 413 aa, synthetic construct; identical to SEQ ID NO: 16324

SEQ ID NO: 24312 - protein, 413 aa, synthetic construct; identical to SEQ ID NO: 3587

SEQ ID NO: 24313 - protein, 412 aa, synthetic construct; identical to SEQ ID NO: 3155

SEQ ID NO: 24314 - protein, 413 aa, synthetic construct; identical to SEQ ID NO: 8063

SEQ ID NO: 24315 - protein, 415 aa, synthetic construct; identical to SEQ ID NO: 3548

SEQ ID NO: 24316 - protein, 426 aa, synthetic construct; identical to SEQ ID NO: 16508

SEQ ID NO: 24317 - protein, 415 aa, synthetic construct; identical to SEQ ID NO: 16542

SEQ ID NO: 24318 - protein, 413 aa, unidentified; identical to SEQ ID NO: 16543
  source 1..413: note = Lachnospiraceae bacterium UBA2888

SEQ ID NO: 24319 - protein, 412 aa, synthetic construct; identical to SEQ ID NO: 16549

SEQ ID NO: 24320 - protein, 413 aa, unidentified; identical to SEQ ID NO: 16574

SEQ ID NO: 24321 - protein, 413 aa, synthetic construct; identical to SEQ ID NO: 10655

SEQ ID NO: 24322 - protein, 413 aa, synthetic construct; identical to SEQ ID NO: 3587

SEQ ID NO: 24323 - protein, 413 aa, synthetic construct; identical to SEQ ID NO: 2636

SEQ ID NO: 24324 - protein, 416 aa, synthetic construct; identical to SEQ ID NO: 6623

SEQ ID NO: 24325 - protein, 413 aa, synthetic construct; identical to SEQ ID NO: 3220

SEQ ID NO: 24326 - protein, 438 aa, synthetic construct; identical to SEQ ID NO: 4848

SEQ ID NO: 24327 - protein, 412 aa, synthetic construct; identical to SEQ ID NO: 3155

SEQ ID NO: 24328 - protein, 413 aa, synthetic construct; identical to SEQ ID NO: 17000

SEQ ID NO: 24329 - protein, 413 aa, synthetic construct; identical to SEQ ID NO: 17022

SEQ ID NO: 24330 - protein, 413 aa, synthetic construct; identical to SEQ ID NO: 3220

SEQ ID NO: 24331 - protein, 413 aa, synthetic construct; identical to SEQ ID NO: 17062

SEQ ID NO: 24332 - protein, 413 aa, synthetic construct; identical to SEQ ID NO: 3476

SEQ ID NO: 24333 - protein, 413 aa, synthetic construct; identical to SEQ ID NO: 3587

SEQ ID NO: 24334 - protein, 429 aa, synthetic construct; identical to SEQ ID NO: 17143

SEQ ID NO: 24335 - protein, 354 aa, synthetic construct; identical to SEQ ID NO: 17228

SEQ ID NO: 24336 - protein, 438 aa, synthetic construct; identical to SEQ ID NO: 12384

SEQ ID NO: 24337 - protein, 413 aa, synthetic construct; identical to SEQ ID NO: 2636

SEQ ID NO: 24338 - protein, 416 aa, synthetic construct; identical to SEQ ID NO: 6623

SEQ ID NO: 24339 - protein, 413 aa, synthetic construct; identical to SEQ ID NO: 3220

SEQ ID NO: 24340 - protein, 413 aa, synthetic construct; identical to SEQ ID NO: 11796

SEQ ID NO: 24341 - protein, 432 aa, unidentified; identical to SEQ ID NO: 6688
  source 1..432: note = Sharpea sp.

SEQ ID NO: 24342 - protein, 413 aa, synthetic construct; identical to SEQ ID NO: 2636

SEQ ID NO: 24343 - protein, 413 aa, synthetic construct; identical to SEQ ID NO: 17543

SEQ ID NO: 24344 - protein, 413 aa, synthetic construct; identical to SEQ ID NO: 3220

SEQ ID NO: 24345 - protein, 413 aa, synthetic construct; identical to SEQ ID NO: 11796

SEQ ID NO: 24346 - protein, 413 aa, synthetic construct; identical to SEQ ID NO: 17626

SEQ ID NO: 24347 - protein, 499 aa, synthetic construct; identical to SEQ ID NO: 17701

SEQ ID NO: 24348 - protein, 413 aa, synthetic construct; identical to SEQ ID NO: 3695

SEQ ID NO: 24349 - protein, 413 aa, synthetic construct; identical to SEQ ID NO: 11242

SEQ ID NO: 24350 - protein, 493 aa, synthetic construct; identical to SEQ ID NO: 17845

SEQ ID NO: 24351 - protein, 413 aa, synthetic construct; identical to SEQ ID NO: 2636

SEQ ID NO: 24352 - protein, 413 aa, synthetic construct; identical to SEQ ID NO: 3751

SEQ ID NO: 24353 - protein, 340 aa, synthetic construct; identical to SEQ ID NO: 17898

SEQ ID NO: 24354 - protein, 415 aa, synthetic construct; identical to SEQ ID NO: 3635

SEQ ID NO: 24355 - protein, 357 aa, synthetic construct; identical to SEQ ID NO: 17903

SEQ ID NO: 24356 - protein, 413 aa, synthetic construct; identical to SEQ ID NO: 17955

SEQ ID NO: 24357 - protein, 380 aa, synthetic construct; identical to SEQ ID NO: 17973

SEQ ID NO: 24358 - protein, 412 aa, synthetic construct; identical to SEQ ID NO: 16549

SEQ ID NO: 24359 - protein, 412 aa, synthetic construct; identical to SEQ ID NO: 18030

SEQ ID NO: 24360 - protein, 412 aa, synthetic construct; identical to SEQ ID NO: 10534

SEQ ID NO: 24361 - protein, 416 aa, synthetic construct; identical to SEQ ID NO: 18097

SEQ ID NO: 24362 - protein, 413 aa, synthetic construct; identical to SEQ ID NO: 9873

SEQ ID NO: 24363 - protein, 413 aa, synthetic construct; identical to SEQ ID NO: 3476

SEQ ID NO: 24364 - protein, 413 aa, synthetic construct; identical to SEQ ID NO: 3621

SEQ ID NO: 24365 - protein, 415 aa, synthetic construct; identical to SEQ ID NO: 10543

SEQ ID NO: 24366 - protein, 416 aa, synthetic construct; identical to SEQ ID NO: 7785

SEQ ID NO: 24367 - protein, 413 aa, synthetic construct; identical to SEQ ID NO: 5477

SEQ ID NO: 24368 - protein, 413 aa, synthetic construct; identical to SEQ ID NO: 7541

SEQ ID NO: 24369 - protein, 415 aa, synthetic construct; identical to SEQ ID NO: 15940

SEQ ID NO: 24370 - protein, 413 aa, synthetic construct; identical to SEQ ID NO: 3220

SEQ ID NO: 24371 - protein, 413 aa, synthetic construct; identical to SEQ ID NO: 3587

SEQ ID NO: 24372 - protein, 413 aa, synthetic construct; identical to SEQ ID NO: 3290

SEQ ID NO: 24373 - protein, 416 aa, synthetic construct; identical to SEQ ID NO: 18455

SEQ ID NO: 24374 - protein, 413 aa, Roseburia sp.; identical to SEQ ID NO: 18461

SEQ ID NO: 24375 - protein, 412 aa, synthetic construct; identical to SEQ ID NO: 18463

SEQ ID NO: 24376 - protein, 415 aa, synthetic construct; identical to SEQ ID NO: 11853

SEQ ID NO: 24377 - protein, 413 aa, synthetic construct; identical to SEQ ID NO: 10655

SEQ ID NO: 24378 - protein, 413 aa, synthetic construct; identical to SEQ ID NO: 2858

SEQ ID NO: 24379 - protein, 413 aa, synthetic construct; identical to SEQ ID NO: 3220

SEQ ID NO: 24380 - protein, 412 aa, synthetic construct; identical to SEQ ID NO: 5980

SEQ ID NO: 24381 - protein, 412 aa, synthetic construct; identical to SEQ ID NO: 3155

SEQ ID NO: 24382 - protein, 415 aa, synthetic construct; identical to SEQ ID NO: 18693

SEQ ID NO: 24383 - protein, 413 aa, Blautia sp.; identical to SEQ ID NO: 3616

SEQ ID NO: 24384 - protein, 367 aa, synthetic construct; identical to SEQ ID NO: 18719

SEQ ID NO: 24385 - protein, 413 aa, synthetic construct; identical to SEQ ID NO: 8345

SEQ ID NO: 24386 - protein, 413 aa, synthetic construct; identical to SEQ ID NO: 3220

SEQ ID NO: 24387 - protein, 416 aa, synthetic construct; identical to SEQ ID NO: 18779

SEQ ID NO: 24388 - protein, 413 aa, synthetic construct; identical to SEQ ID NO: 11236

SEQ ID NO: 24389 - protein, 413 aa, synthetic construct; identical to SEQ ID NO: 9603

SEQ ID NO: 24390 - protein, 432 aa, synthetic construct; identical to SEQ ID NO: 18870

SEQ ID NO: 24391 - protein, 412 aa, synthetic construct; identical to SEQ ID NO: 6913

SEQ ID NO: 24392 - protein, 333 aa, synthetic construct; identical to SEQ ID NO: 18886

SEQ ID NO: 24393 - protein, 412 aa, synthetic construct; identical to SEQ ID NO: 18030

SEQ ID NO: 24394 - protein, 413 aa, synthetic construct; identical to SEQ ID NO: 19039

SEQ ID NO: 24395 - protein, 413 aa, synthetic construct; identical to SEQ ID NO: 3023

SEQ ID NO: 24396 - protein, 415 aa, synthetic construct; identical to SEQ ID NO: 10543

SEQ ID NO: 24397 - protein, 413 aa, synthetic construct; identical to SEQ ID NO: 3695

SEQ ID NO: 24398 - protein, 413 aa, Lactobacillus sp.; identical to SEQ ID NO: 19286

SEQ ID NO: 24399 - protein, 415 aa, synthetic construct; identical to SEQ ID NO: 10543

SEQ ID NO: 24400 - protein, 413 aa, synthetic construct; identical to SEQ ID NO: 19308

SEQ ID NO: 24401 - protein, 416 aa, synthetic construct; identical to SEQ ID NO: 6623

SEQ ID NO: 24402 - protein, 413 aa, synthetic construct; identical to SEQ ID NO: 2636

SEQ ID NO: 24403 - protein, 413 aa, synthetic construct; identical to SEQ ID NO: 4044

SEQ ID NO: 24404 - protein, 413 aa, synthetic construct; identical to SEQ ID NO: 7541

SEQ ID NO: 24405 - protein, 412 aa, synthetic construct; identical to SEQ ID NO: 19426

SEQ ID NO: 24406 - protein, 353 aa, synthetic construct; identical to SEQ ID NO: 19460

SEQ ID NO: 24407 - protein, 413 aa, synthetic construct; identical to SEQ ID NO: 3695

SEQ ID NO: 24408 - protein, 415 aa, synthetic construct; identical to SEQ ID NO: 19565

SEQ ID NO: 24409 - protein, 413 aa, synthetic construct; identical to SEQ ID NO: 19635

SEQ ID NO: 24410 - protein, 413 aa, synthetic construct; identical to SEQ ID NO: 19639

SEQ ID NO: 24411 - protein, 413 aa, synthetic construct; identical to SEQ ID NO: 19643

SEQ ID NO: 24412 - protein, 411 aa, synthetic construct; identical to SEQ ID NO: 2867

SEQ ID NO: 24413 - protein, 413 aa, synthetic construct; identical to SEQ ID NO: 11242

SEQ ID NO: 24414 - protein, 412 aa, synthetic construct; identical to SEQ ID NO: 5980

SEQ ID NO: 24415 - protein, 413 aa, Blautia sp.; identical to SEQ ID NO: 3616

SEQ ID NO: 24416 - protein, 413 aa, synthetic construct; identical to SEQ ID NO: 3295

SEQ ID NO: 24417 - protein, 412 aa, synthetic construct; identical to SEQ ID NO: 3155

SEQ ID NO: 24418 - protein, 413 aa, synthetic construct; identical to SEQ ID NO: 5965

SEQ ID NO: 24419 - protein, 413 aa, synthetic construct; identical to SEQ ID NO: 2636

SEQ ID NO: 24420 - protein, 413 aa, synthetic construct; identical to SEQ ID NO: 20091

SEQ ID NO: 24421 - protein, 413 aa, synthetic construct; identical to SEQ ID NO: 3295

SEQ ID NO: 24422 - protein, 390 aa, synthetic construct; identical to SEQ ID NO: 20158

SEQ ID NO: 24423 - protein, 413 aa, synthetic construct; identical to SEQ ID NO: 3023

SEQ ID NO: 24424 - protein, 415 aa, synthetic construct; identical to SEQ ID NO: 10543

SEQ ID NO: 24425 - protein, 416 aa, synthetic construct; identical to SEQ ID NO: 18097

SEQ ID NO: 24426 - protein, 412 aa, synthetic construct; identical to SEQ ID NO: 3155

SEQ ID NO: 24427 - protein, 413 aa, synthetic construct; identical to SEQ ID NO: 3220

SEQ ID NO: 24428 - protein, 413 aa, synthetic construct; identical to SEQ ID NO: 3587

SEQ ID NO: 24429 - protein, 413 aa, synthetic construct; identical to SEQ ID NO: 20523

SEQ ID NO: 24430 - protein, 418 aa, synthetic construct; identical to SEQ ID NO: 7032

SEQ ID NO: 24431 - protein, 415 aa, synthetic construct; identical to SEQ ID NO: 10543

SEQ ID NO: 24432 - protein, 415 aa, synthetic construct; identical to SEQ ID NO: 11876

SEQ ID NO: 24433 - protein, 413 aa, synthetic construct; identical to SEQ ID NO: 20630

SEQ ID NO: 24434 - protein, 413 aa, synthetic construct; identical to SEQ ID NO: 20658

SEQ ID NO: 24435 - protein, 341 aa, synthetic construct; identical to SEQ ID NO: 20661

SEQ ID NO: 24436 - protein, 413 aa, synthetic construct; identical to SEQ ID NO: 10655

SEQ ID NO: 24437 - protein, 415 aa, synthetic construct; identical to SEQ ID NO: 3548

SEQ ID NO: 24438 - protein, 413 aa, synthetic construct; identical to SEQ ID NO: 3476

SEQ ID NO: 24439 - protein, 422 aa, synthetic construct; identical to SEQ ID NO: 20791

SEQ ID NO: 24440 - protein, 415 aa, synthetic construct; identical to SEQ ID NO: 20866

SEQ ID NO: 24441 - protein, 413 aa, synthetic construct; identical to SEQ ID NO: 3587

SEQ ID NO: 24442 - protein, 413 aa, synthetic construct; identical to SEQ ID NO: 20961

SEQ ID NO: 24443 - protein, 413 aa, synthetic construct; identical to SEQ ID NO: 12039

SEQ ID NO: 24444 - protein, 413 aa, synthetic construct; identical to SEQ ID NO: 20979

SEQ ID NO: 24445 - protein, 415 aa, synthetic construct; identical to SEQ ID NO: 6044

SEQ ID NO: 24446 - protein, 413 aa, synthetic construct; identical to SEQ ID NO: 3295

SEQ ID NO: 24447 - protein, 413 aa, synthetic construct; identical to SEQ ID NO: 21034

SEQ ID NO: 24448 - protein, 412 aa, synthetic construct; identical to SEQ ID NO: 3155

SEQ ID NO: 24449 - protein, 416 aa, synthetic construct; identical to SEQ ID NO: 7785

SEQ ID NO: 24450 - protein, 411 aa, synthetic construct; identical to SEQ ID NO: 2867

SEQ ID NO: 24451 - protein, 413 aa, synthetic construct; identical to SEQ ID NO: 5477

SEQ ID NO: 24452 - protein, 413 aa, synthetic construct; identical to SEQ ID NO: 5965

SEQ ID NO: 24453 - protein, 413 aa, Blautia sp.; identical to SEQ ID NO: 9603

SEQ ID NO: 24454 - protein, 363 aa, synthetic construct; identical to SEQ ID NO: 21272

SEQ ID NO: 24455 - protein, 413 aa, synthetic construct; identical to SEQ ID NO: 21278

SEQ ID NO: 24456 - protein, 415 aa, synthetic construct; identical to SEQ ID NO: 6044

SEQ ID NO: 24457 - protein, 413 aa, synthetic construct; identical to SEQ ID NO: 7120

SEQ ID NO: 24458 - protein, 413 aa, synthetic construct; identical to SEQ ID NO: 21435

SEQ ID NO: 24459 - protein, 415 aa, synthetic construct; identical to SEQ ID NO: 21527

SEQ ID NO: 24460 - protein, 413 aa, synthetic construct; identical to SEQ ID NO: 21582

SEQ ID NO: 24461 - protein, 413 aa, synthetic construct; identical to SEQ ID NO: 2636

SEQ ID NO: 24462 - protein, 413 aa, synthetic construct; identical to SEQ ID NO: 3295

SEQ ID NO: 24463 - protein, 411 aa, synthetic construct; identical to SEQ ID NO: 2867

SEQ ID NO: 24464 - protein, 412 aa, synthetic construct; identical to SEQ ID NO: 6913

SEQ ID NO: 24465 - protein, 413 aa, synthetic construct; identical to SEQ ID NO: 21825

SEQ ID NO: 24466 - protein, 415 aa, synthetic construct; identical to SEQ ID NO: 11876

SEQ ID NO: 24467 - protein, 413 aa, synthetic construct; identical to SEQ ID NO: 3023

SEQ ID NO: 24468 - protein, 413 aa, synthetic construct; identical to SEQ ID NO: 3023

SEQ ID NO: 24469 - protein, 413 aa, synthetic construct; identical to SEQ ID NO: 7540

SEQ ID NO: 24470 - protein, 438 aa, synthetic construct; identical to SEQ ID NO: 21974

SEQ ID NO: 24471 - protein, 413 aa, synthetic construct; identical to SEQ ID NO: 3220

SEQ ID NO: 24472 - protein, 413 aa, synthetic construct; identical to SEQ ID NO: 15509

SEQ ID NO: 24473 - protein, 392 aa, synthetic construct; identical to SEQ ID NO: 22007

SEQ ID NO: 24474 - protein, 413 aa, synthetic construct; identical to SEQ ID NO: 3295

SEQ ID NO: 24475 - protein, 413 aa, synthetic construct; identical to SEQ ID NO: 22070

SEQ ID NO: 24476 - protein, 413 aa, synthetic construct; identical to SEQ ID NO: 5965

SEQ ID NO: 24477 - protein, 412 aa, synthetic construct; identical to SEQ ID NO: 22092

SEQ ID NO: 24478 - protein, 415 aa, synthetic construct; identical to SEQ ID NO: 3635

SEQ ID NO: 24479 - protein, 413 aa, synthetic construct; identical to SEQ ID NO: 7541

SEQ ID NO: 24480 - protein, 412 aa, synthetic construct; identical to SEQ ID NO: 6276

SEQ ID NO: 24481 - protein, 406 aa, synthetic construct; identical to SEQ ID NO: 22453

SEQ ID NO: 24482 - protein, 413 aa, synthetic construct; identical to SEQ ID NO: 22494

SEQ ID NO: 24483 - protein, 380 aa, synthetic construct; identical to SEQ ID NO: 22515

SEQ ID NO: 24484 - protein, 413 aa, synthetic construct; identical to SEQ ID NO: 22531

SEQ ID NO: 24485 - protein, 413 aa, synthetic construct; identical to SEQ ID NO: 3220

SEQ ID NO: 24486 - protein, 413 aa, synthetic construct; identical to SEQ ID NO: 22579

SEQ ID NO: 24487 - protein, 413 aa, synthetic construct; identical to SEQ ID NO: 3587

SEQ ID NO: 24488 - protein, 415 aa, synthetic construct; identical to SEQ ID NO: 10543

SEQ ID NO: 24489 - protein, 413 aa, synthetic construct; identical to SEQ ID NO: 22614

SEQ ID NO: 24490 - protein, 413 aa, synthetic construct; identical to SEQ ID NO: 3476

SEQ ID NO: 24491 - protein, 413 aa, synthetic construct; identical to SEQ ID NO: 22668

SEQ ID NO: 24492 - protein, 413 aa, synthetic construct; identical to SEQ ID NO: 15509

SEQ ID NO: 24493 - protein, 415 aa, synthetic construct; identical to SEQ ID NO: 3635

SEQ ID NO: 24494 - protein, 414 aa, Clostridium sp.; identical to SEQ ID NO: 8775

SEQ ID NO: 24495 - protein, 415 aa, synthetic construct; identical to SEQ ID NO: 22742

SEQ ID NO: 24496 - protein, 432 aa, synthetic construct; identical to SEQ ID NO: 22779

SEQ ID NO: 24497 - protein, 413 aa, synthetic construct; identical to SEQ ID NO: 3220

SEQ ID NO: 24498 - protein, 416 aa, synthetic construct; identical to SEQ ID NO: 22829

SEQ ID NO: 24499 - protein, 409 aa, synthetic construct; identical to SEQ ID NO: 22890

SEQ ID NO: 24500 - protein, 413 aa, synthetic construct; identical to SEQ ID NO: 22925

SEQ ID NO: 24501 - protein, 413 aa, unidentified; identical to SEQ ID NO: 5477

SEQ ID NO: 24502 - protein, 374 aa, unidentified; identical to SEQ ID NO: 22942

SEQ ID NO: 24503 - protein, 432 aa, unidentified; identical to SEQ ID NO: 22962

SEQ ID NO: 24504 - protein, 413 aa, unidentified; identical to SEQ ID NO: 22992

SEQ ID NO: 24505 - protein, 416 aa, unidentified; identical to SEQ ID NO: 10554

SEQ ID NO: 24506 - protein, 413 aa, unidentified; identical to SEQ ID NO: 23035

SEQ ID NO: 24507 - protein, 413 aa, unidentified; identical to SEQ ID NO: 5965

SEQ ID NO: 24508 - protein, 413 aa, unidentified; identical to SEQ ID NO: 7541

SEQ ID NO: 24509 - protein, 406 aa, unidentified; identical to SEQ ID NO: 23199

SEQ ID NO: 24510 - protein, 411 aa, unidentified; identical to SEQ ID NO: 2867

SEQ ID NO: 24511 - protein, 413 aa, unidentified; identical to SEQ ID NO: 5477

SEQ ID NO: 24512 - protein, 415 aa, unidentified; identical to SEQ ID NO: 10543

SEQ ID NO: 24513 - protein, 415 aa, unidentified; identical to SEQ ID NO: 10543

SEQ ID NO: 24514 - protein, 413 aa, unidentified; identical to SEQ ID NO: 3023

SEQ ID NO: 24515 - protein, 397 aa, unidentified; identical to SEQ ID NO: 23534

SEQ ID NO: 24516 - protein, 422 aa, unidentified; identical to SEQ ID NO: 13422

SEQ ID NO: 24517 - protein, 413 aa, unidentified; identical to SEQ ID NO: 7841

SEQ ID NO: 24518 - protein, 412 aa, unidentified; identical to SEQ ID NO: 23606

SEQ ID NO: 24519 - protein, 413 aa, unidentified; identical to SEQ ID NO: 23612

SEQ ID NO: 24520 - protein, 413 aa, unidentified; identical to SEQ ID NO: 3220

SEQ ID NO: 24521 - protein, 425 aa, unidentified; identical to SEQ ID NO: 23646
  source 1..425: note = Firmicutes bacterium

SEQ ID NO: 24522 - protein, 413 aa, synthetic construct; identical to SEQ ID NO: 10778

SEQ ID NO: 24523 - protein, 412 aa, synthetic construct; identical to SEQ ID NO: 5053

SEQ ID NO: 24524 - protein, 405 aa, synthetic construct; identical to SEQ ID NO: 6076

SEQ ID NO: 24525 - protein, 464 aa, synthetic construct
MPVCVLSANGERLMPTENYGKVRHLLKDGRAVIAKRNPFTIQLTYETSTYTQPIELCVGTGYEHIGVSIKAKAKEVVSQQYDLLTNERSRHDDCRAYRRTRRNRLRYRAARFNNRVSSKMPGWIAPSLDNKVERHLDIISRYLSVMPVKDVFIKAATYDTQLLAALEAGEPVPQGKDYQHGPQYGYDTLREAVFERDHYTCVYCKRGLKDGAILHVHHAYYWKGLHGNSMRELATCCEKCNTPANHKEGGKLWGFDKPLRKYTGEAFMNSVRWILYQRAMARFQGAAEVHMTYGVISKRVRTNLGLPYSCATDAYCMGELRPEARCETEVFQKYRRNNRVLSKFYDAKYYDTREKGVIRSGNELSSGRTNRNHNLDGENLRRFRGCKKSKGRTSTRKQRYAMQPGDIVVYGNRKYVSKGCSSYGKALSLLTDGKPLMVSMKKIQLVRHKGGWVRLPHAAAEAKK

SEQ ID NO: 24526 - protein, 443 aa, Scytonema sp.
MKVYVVNKHGKPLMPTTPRKARLLLKEGKAKIYCRAPFTIQLIYGSSGYTQPGNLGIDAGYQNIGYSVVNEKEELIGGEVQMLKGVSERLTERKKYRQQRRNRKRYRAPRFDNRRRKDNWLAPSIQHKLDTHHKIIDKIQKIVPVKKITIEVASFDIQRIKDAEIQGVGYQQGEKYGFDNLREYILHRDGHKCQNPNCKNKDVNPILEVHHLGFWKEDRTDRPANLITLCNKCHASKNHKKSGFLCGWEPKLKSFKGETFMTTVRWRLTNDGRYSSTYGYITKGIRREFKIEKSHHNDAFVVAGGTIQKRVESLILEQIRRNKRSMEQFYDAKYIDSRDGSTKSGSELSSGRRTRNKQKNGENLRLYRKHKVSKGQRRIKKYRYRYQPKDLVQFEGQVYEVIGMQNLGTGVKLKNYPGVKNKVVNVNKVNPVKRRSGLCQIVP

SEQ ID NO: 24527 - protein, 443 aa, Scytonema sp.; identical to SEQ ID NO: 24526

SEQ ID NO: 24528 - protein, 443 aa, Scytonema sp.; identical to SEQ ID NO: 24526

SEQ ID NO: 24529 - protein, 443 aa, Scytonema sp.; identical to SEQ ID NO: 24526

SEQ ID NO: 24530 - protein, 442 aa, Scytonema sp.
MKVYVVNKHGRPLMPTTPRKARLLLNVGKANIYCREPFTIQLIYGSSGYTQRGDLGIDAGYQNIGYSVVNEKEELIGGEVQMLRGMSERLTERKKYRQQRRNRRRHRASRLNNRKCKEGWLSPSTQHKLDTHHKIIDLVKSVVPVKEVVVEVASFDIQKIKDGTIEGVGYQQGEQYDFDNLREYILHRDGHKCQNPNCKNKSCAPILQVHHIGFWKEDRTDRPANLITLCDKCHTPKNHKKNGFLFGWEPKLNSFKGETFMSTVRWRLTLEGEYRVTYGYITKGVRRDFNIEKSHHNDAFVIAGGTTQRRTEPLMLEQIRRNKRSMEQFYDAKYIDSRDGSIKSGSELSSGRRTRNKQKNGENLRLYRKQKTSDGQRRIKKQRYRYQPKDFVQFEGKIYEVIGMQNLGTGVKLKNYPGIKNKVVNVGKVKSIKRRSGLRTKL

SEQ ID NO: 24531 - protein, 478 aa, synthetic construct
MTGNCTRSVKGKNKMPVCVLSANGERLMPTENYGKVRHLLKDGRAVIAKRNPFTIQLTYDTSTYTQPIEMCVGTGYEHIGVSIKTKAKEVVSQQYDMLTNERSRHDDCRAYRRTRRNRLRYRAARFNNRVSGKKPGWIAPSLDNKVERHLDIISRYLSVMPVTDVFIKAATYDTQLLAALEAGEPVPQGKDYQHGPQYGYDTLREAVFERDHYTCVYCKRGLKDGAILHVHHAYYWKGLHGNSMRELATCCEKCNTPANHKEGGKLWGFDKPLRKYTGEAFMNSVRWILYQRAMARFQGVAEVHMTYGVISKRVRTNLGLPYSCATDAYCMGELRPEARCETEVFQKYRRNNRVLSKFYDAKYYDTREKGVIRSGNELSSGRTNRNHNLDGENLRRFRGCKKSKGRTSTRKQRYAMQPGDIVVYGNRKYVSKGCSSYGRALSLLTDGKPLMVSMKKIQLVRHKGGWVRLPHAAAEAKK

SEQ ID NO: 24532 - protein, 464 aa, synthetic construct; identical to SEQ ID NO: 24525

SEQ ID NO: 24533 - protein, 443 aa, Tolypothrix sp.
MKIYVVNKYGKPLMPTSPRKARSLLKEGKAKIYSRDPFTIQLVYGSSGYTQPGNLGIDAGYQNIGYSVVNEKEELIGGEVRMLKGMSERLTERKKYRCQRRNRKRYRAPRFDNRRRKDNWLAPSIQHKLDIHHKIIDKIQKIVPVKEVTIEVASFDIQKIKDAEIQGVGYQQGEQHGFDNLREYILHRDAHKCQNPNCKNKDTNPILEVHHLGFWKEDRTDRPANLVTLCDKCHIPKNHKKSGFLYGWQPRLKSFKGETFMTTIRWRLTKEGKYSSTYGYITKSIRRKFKIEKSHHNDAFVIAGGTIQKRVESLILEQIRRNKRSMEQFYDAKYIDARDGSTKSGSELSSGRRTRNKQKNGENLRLYRKHKVSKGQCRIKKYRYRYQPKDLVQFEGRVYEVVGMQNLGTGVKLKNYPGVKNKVVNVNKVNSVKRRSGLCEIVL

SEQ ID NO: 24534 - protein, 478 aa, synthetic construct; identical to SEQ ID NO: 24531

SEQ ID NO: 24535 - protein, 452 aa, Lactobacillus sp.
MSKIKKVDYIYVVDSNGTPLMPTSRLGMVRRWLKTGQAKWYGNSRNTIQFVRPVTTNTQDLTLGVDAGFHLGLSVVGNNREYYVSESLRKSEKDRITSRRESRRTRRNRLRYRKARFDNRRHKDGWLAPSIQHRLDFTIKEIKRLYTFLPITNLVVEVTPFDNQKLLNPNIKGWQYQKGKMYGFKTIKDYLLARDNYRDALDGKQYPASQLRVHHLVQRKDGGSNQPDNLVLLSDINHNQANHNNGILAKLRENRQKMLDYRGAYFMSILAARLSDYFDEYTTTQGYLTANLRQKYEIEKSHLNDAFVIAGGTDTTFRTNNIYSRQKLRNNNRVLQLFYDAKYIDSRDGKQKAGKELSSGRTRRSRELNYTNLRQFRKEKVKKGRVSIRRNHYQLRPHDVVLNTKTNRIERVKSVISRGKSVILQSGKSSTVKNIVSLYHVNGMLETKMENI

SEQ ID NO: 24536 - protein, 454 aa, Lactobacillus sp.
MPQKKVEYIYVVDSKGEPVMPTSRLGMVRRWLKSGQAIWYGNSRKTIQFVRPITTNTQELTLGVDAGFHLGLSVVSVDNQREYYASESVRDSKREKEKLEHRRDLRRGRRNRLRHRKKRFKNRKRQKKSLAPSVQHLLDFTIREIKRLYEFLPISKLVVEVAPFDNQKLANPNIKPWEYTQGRMHGFKSVKDYLLARDGYRDALDGKVYPASQLRVHHLVQRKDGGTNQPDNLVLLSDVNHNQANHVDGTLAKLAAERQTDLNTNYRGAYFMSVLAKRLPTYFANYIQTQGYITANLRTLYGIEKSHRNDAFIIAGGTDTCLRTSNIYSRTKVANNNRVLQKFYDARYIDSRDGKIKPGKKLSSGRTKRSRELDYKNQRIYRQEKVTKGRVSIRRNHYQLRPHDIVLNTKTNRIETVRSVVNRGKSVVFQTGKSTKPTNVRCLHHINGLREEKM

SEQ ID NO: 24537 - protein, 433 aa, synthetic construct
MQSHIRAFVLDKDRKPLMPCHAAKARKLLKKGKAAVFRRFPFTIILKERTREASAIQDVLVKVDPGSKSTGLAVVRKDEKNVHHALAFICLNHRGSKIRDALTSRRQLRRGRRSRNLRYRAPRFLNRKKPKGWLAPSLQHRVDAVMSWMNRLTRLVPVAGFVQELVKFDTQLMQNAAISGVEYQQGELAGYELKEYLLEKFDRKCVYCGKSGVVLNVEHIIPKARGGSNRVSNLAIACAQCNQKKGAMPIEDFLKKKPALLAQIRKQLKTPLRDATAVNATRWALYRNLQATGCTVEVGSGALTKFNRHAFSVPKEHWLDALCAGRIDGVADWANLRPLQAYCIGRGSHKRTRTDKYGFPLCYFSRYKRPNDFGTGDYVRVKVTRGRNTGIWIGRATLTDGKLSVETKAGRVKATFLNSKCLFKSDGYKYQYL

SEQ ID NO: 24538 - protein, 478 aa, synthetic construct; identical to SEQ ID NO: 24531

SEQ ID NO: 24539 - protein, 453 aa, unidentified
MMSEVQKVNYIYVVDSNGTPLMPTSRLGMVRRWLKTGQARWFGNSRKIIQFVRPVTTNTQELTLGVDAGFHLGLAVVGNQREYYASESLRKSEKDRITSRRELRRTRRNRLRHRQARFDNRRRKDGWLAPSMQHRLDFTIKEIKCLYTFLPITKLVVEVTPFNNQKLLNSNIKPWEYTHGKMNGFKTIKDYLLARDNYRDALDGKQYPASQLRVHHLVQRKDGGTNQPDNLVLLSDINHSQANHNNGSLAKLRENRQKALDYRGAYFMNILATRLGDYFDEYTTTQGYLTANLRQEYQIEKSHLNDAFIIAGGTDTTLRTNNVYSRQKLRNNNRVLQKFYDARYIDSRDNKTKTGKELSSGRTRRSRELNYTNLRQFRKTKVKRGRISIRRNHYQLRPYDVVLNTQTNKIETVKSVQNSGTVIKFQTGKTCSIKNVVSLYHVNGMLEKKIENI

SEQ ID NO: 24540 - protein, 443 aa, synthetic construct
MMKVFVLDKDHKPLMPCGPARARKLLKAGRARVHKLQPFTIRIVDRSLADSVVQKVVVKVDPGSKETGIAVVREDEEETHHALYFINLKHRGAAIRDALTSRRQLRRGRRSRNLRYRAPRFLNRSKPKGWLPPSLQHRVDTTLSWVNRLRRLAPVSGIAQELVKFDTQRMQNPEISGVEYQQGELAGYELKEYLLEKFGRRCVYCAKSGVPLNVEHIVPKARGGSNRLSNLAIACVECNQKKGARPIEEFLKGKPELLARIRKRLKTPLRDAASVNATRWALFEALRATGLPIRTGSGALTKFNRHCFGVPKEHWFDALCVGRINGVSYEPGMKVLNVSCTGRGQYKRTRTDKFGFPICHFMRTKRPHGVGLGDLVRMTVQKGKHPGIWTGRAFPSNDGSVVLILPEFRIKGRARNCSILSLSDGYGYCLTDSETAKPTSFGK

SEQ ID NO: 24541 - protein, 443 aa, synthetic construct
VRHLLKDGRAVIAKRNPFTIQLTYDTSTYTQPIEMCVGTGYEHIGVSIKTKAKEVVSQQYDMLTNERSRHDDCRAYRRTRRNRLRYRAARFNNRVSGKKPGWIAPSLDNKVERHLDIISRYLSVMPVTDVFIKAATYDTQLLAALEAGEPVPQGKDYQHGPQYGYDTLREAVFERDHYTCVYCKRGLKDGAILHVHHAYYWKGLHGNSMRELATCCEKCNTPANHKEGGKLWGFDKPLRKYTGEAFMNSVRWILYQRAMARFQGVAEVHMTYGVISKRVRTNLGLPYSCATDAYCMGELRPEARCETEVFQKYRRNNRVLSKFYDAKYYDTREKGVIRSGNELSSGRTNRNHNLDGKNLRRFRGCKKSKGRTSTRKQRYAMQPGDIVVYGNRKYVSKGCSSYGRALSLLTDGKPLMVSMKKIQLVRHKGGWVRLPHAAAEAKK

SEQ ID NO: 24542 - protein, 431 aa, Acidithiobacillus sp.
MMQRVLVLDRLKQPLMPCHPARARELLREGKAAVFRRFPFTLILKEREGGITQATGVKLDPGSKKTGVALVAAFQRRGNVVIWAAELEHRGATIRKLLEQRLGHRRHRRGNLRYRAPRFDNRSRREGWLAPSLQHRVDTTLSWTKKLMRLAPVTALSMELVKFDMQQMQNPEISGVEYQQGALQGYEVKEYLLEKWGRECAYCDAENVPLEVDHIQPKSKGGSNRVSNLTLACHDCNQRKGNLPIATFLAQQPERLRRIQVRAKAPLRDAAAVNSTRWALFQRLKATNLPVEVASGGRTKWNRSRQQYPKAHWIDAACVGVSGEAVTCDPEQVPLQMKAMGHGERQRARLSAHGFPVGHKAVSKSAYGFQTGDMVKAHIPKGKFQGVHCGRVAIRSRPSFALSTPKKAKPFDVHPKYLTIVHRSDGYVYNT

SEQ ID NO: 24543 - protein, 500 aa, synthetic construct
MTGSYTAAPPQTEHHAVDVPHRMTGNCTRSVKGKNKMPVCVLSANGERLMPTENYGKVRHLLKDGRAVIAKRNPFTIQLTYDTSTYTQPIEMCVGTGYEHIGVSIKTKAKEVVSQQYDMLTNERSRHDDCRAYRRTRRNRLRYRAARFNNRVSGKKPGWIAPSLDNKVERHLDIISRYLSVMPVTDVFIKAATYDTQLLAALEAGEPVPQGKDYQHGPQYGYDTLREAVFERDHYTCVYCKRGLKDGAILHVHHAYYWKGLHGNSMRELATCCEKCNTPANHKEGGKLWGFDKPLRKYTGEAFMNSVRWILYQRAMARFQGVAEVHMTYGVISKRVRTNLGLPYSCATDAYCMGELRPEARCETEVFQKYRRNNRVLSKFYDAKYYDTREKGVIRSGNELSSGRTNRNHNLDGENLRRFRGCKKSKGRTSTRKQRYAMQPGDIVVYGNRKYVSKGCSSYGRALSLLTDGKPLMVSMKKIQLVRHKGGWVRLPHAAAEAKK

SEQ ID NO: 24544 - protein, 425 aa, Sporosarcina sp.
MLVFVVNKHGEALMPCPPRKARMLLNEGKAKIVGYQPFSIQLLYGSSGYKQSVKVGVKLGEKHIGIAVTSVGHVLMKGEVELRTDVKSLIETRKIYRRIRRQRKTRYRKARFLNRKKPKGWLPPSLESRNANTFRWINRFSSLLPGPTLHIEIGKFEVQKLINPSVGGVSPQLSNSEGYYNTRYFVFARDNYSCQVCKKKNKVVKTHHIIYKTEGGSDRADNLITVCTDCHTSGNHRPGEIFWQWMQSGKKLRSYKEPPFTNTLRSRVYEQYPDAILSYGSETTPHRKLIGLEKSLVNEAIAITGIPAIMKMTETTFMAKQFRKKKRSLHEATARKGRKLSNTKSRRNAKNTRASRGFFLNDEVRTICGNIGYISGFTGKNACYVKSITGEYIVISEKKHKQQPLKGLVRRSHQGNWRYQLLHNA

SEQ ID NO: 24545 - protein, 478 aa, synthetic construct
MTGNCTRSVKGKNKMPVCVLSANGERLMPTENYGKVRHLLKDGRAVIAKRNPFTIQLTYDTSTYTQPIEMCVGTGYEHIGVSIKTKAKEVVSQQYDMLTNERSRHDDCRAYRRTRRNRLRYRAARFNNRVSGKKPGWIAPSLDNKVERHLDIISRYLSVMPVTDVFIKAATYDTQLLAALEAGEPVPQGKDYQHGPQYGYDTLREAVFERDHYTCVYCKRGLKDGAILHVHHAYYWKGLHGNSMRELATCCEKCNTPANHKEGGKLWGFDKPLRKYTGEAFMNSVRWILYQRAMARFQGVAEVHMTYGVISKRVRTNLGLPYSCATDAYCMGELRPEARCETEVFQKYRRNNRVLSKFYDAKYYDTREKGVIRSGNELSSGRTNRNHNLDGENLRRFRGCKKSKGRTSTRKQRYAMQPGDIVVYGNRKYASKGCSSYGRALSLLTDGKPLVVSMKKIQLVRHKGGWVRLPQAAAGAKE

SEQ ID NO: 24546 - protein, 427 aa, Acidiferrobacter sp.
MQRVLVLDKNRQPLMPCHPARARELLREGKAAVFRRFPFTIILKDRTGGAVQDVCLKLNPGSRVTGLALVAQFIRRGSTVIWAGELAHRGAAIRKALEQRRGHRRLRRAHLRYRAPRFDNRTKPEGWLAPSLQHRVDTTMTWVCRLRQWVPVTNLSTMLHRFDTQALQNPEISGVEYQQGELQGYEVREYLLEKWGRQCAYCDAEHAPLTIDHIHPTSRGGSDRVSNLTLACFPCNQRKSNRPLTEFLAHDPKRLARIEAQRKAPLRDAAAVNSTRWALFGTLKKTGLPVEVGTGGRTKYNRVRQGYVKAHWIDAACVGKSGDAVSLHSEQRSLAIEAMGHGERQRTRLNRHGFPVGHKTGTKSFSGFQTGDLVRARVLKGKHAGIHVGRVAIRFRPSFALKTAADIFDVHPKYLSLIQRSDGYAYQ

SEQ ID NO: 24547 - protein, 443 aa, synthetic construct
MMKVFVLDKDHKPLMPCGPARARKLLKAGRARVHKLQPFTIRIVDRSLADSVVQKVVVKVDPGSKETGIAVVREDEEETHHALYFINLKHRGAAIRDALTSRRQLRRGRRSRNLRYRAPRFLNRSKPKGWLPPSLQHRVDTTLSWVNRLRRLAPVSGIAQELVKFDTQLMQNPDISGVEYQQGELAGYELKEYLLEKFGRRCVYCAKSDVPLNVEHIVPKARGGSNRLSNLAIACVECNQKKGAKPIEEFLKGKPELLARVRKQLKTPLRDAASVNATRWALFHALSATGLPVRTGSGALTKYNRHCFGVPKEHWFDALCVGRINGVSYEPGMKVLNVSCTGRGQYKRTRTDKFGFPICHFMRTKRPHGVGLGDLVRMTVQKGKHPGIWTGRAFPSNDGRVVLILPEFRIWGRARNCSILSISDGYGYRLTDSETTKPTSFGK

SEQ ID NO: 24548 - protein, 453 aa, Lactobacillus sp.
MMSEKKKVDYIYVVDSNGTPLMPTSRLGMVRRWLKTGQARWFGNSRKIIQFVRPVTTNTQKLTLGVDAGFHLGLSVVGNNREYYAAESLRKSEKYRIASRKKLRRTRRNRLRYRKIRFDNRKHKDGWLVPSIQHRLDFTIKEIKRLYTFLPITNLVVEVTPFDNQKLLNPSIKSWQYQKGKMYGFKTIKDYLLARDNYRDALDGKQYPASQLRVHHLVQRKNGGSNQPDNLVLLSDINHNQANHNNGVLAKLRQNRQKTIDYRGAYFMSILAIRLSNYFDEYTTTQGYLTANLRQKYKIEKSHLNDAFVIAGGTDVTLRTNNVYSRQKLRNNNRSLQKFYDAKYIDSRDGKQKAGKELSSGRTRRSRELNYDNLRQFRKEKVKKGRVSIRRNHYQLRPYDVVLNAKTNKIERVKSVQGNGKSVKFQTGKACSIKNVISLYHVNGMLEKKIEYI

SEQ ID NO: 24549 - protein, 460 aa, synthetic construct
LARGTLRQRSILWNRLLPDSRKGKDFFMQPHIRAFVLDKDRKPLMPCHAARARKLLKKGKAAVFRRFPFTIILKERTREASAVQDVLVKIDPGSKSTGIAVVRKDKKDVHHALAFICLNHRGSKIRDALTSRRQLRRGRRSRNLRYRAPRFLNRTKPQGSLAPSLRHRVDTVMSWMNRLTRLVPVTGFVQELVKFDTQLMQNAAISGVEYQQGELAGYELKEYLLEKFDRKCVYCGKSGVVLNVEHIIPKARGGSNRVSNLAIACVQCNQKKGAMPIEDFLKKKPALLAQIRKQLKTTLRDAAAVNATRWSLFRSLQSTGCTVEVGSGAQTKFNRHAFSVPKEHWLDALCTGRIDGVADWEKLRPLQAYCIGRGSHKRTRTDKYGFPLCYFSRRKRPNDFGTGDYVRVKVTRGRNAGIWTGRATLTDGKLSVETKAGRVKATFLNSKCLFKSDGYKYQYL

SEQ ID NO: 24550 - protein, 432 aa, unidentified
  source 1..432: note = Methylacidimicrobium sp.
MTQNRVLVLDKNRQPLMPCHPARARELLRKGKAAVFRRHPFTIILKDREGGEVQQIRIKLDPGSKETGMALVAHFARRGPTVIWAGELTHQGAAIRKALEQRRAHRRFRRAKLRYRAPRFDNRTRREGWLPPSLQHRVDTTMTWVERLLRWAPVSALSQELVRFDTQALQNPESSGAEYQQGTLQGYEVREYLLEKWGRKCAYCGAENVSLEIDHIHPRSKGGSDRVSNLTLACRPCNQRKANRDVAEFLEKDPKRLARIEAQRKATLKDAAAVNSTRWALWRGLVAIGLPVEVGTGGRTKWNRHRQNYPKAHWIDAACVGESGGAVRLDADHRPLAIRAMGHGERQQARLNRYGFPVGHKAGAKRFLGFQTGDIVRAVIPAGKYAGTFLGRIAIRFRPSFSFVPSADGKVFDVHPKHLTLLQRSDGYVYTQ

SEQ ID NO: 24551 - protein, 427 aa, Alicyclobacillus sp.
MKQNRVLVLDTNRQPLMPCHPARARQLLKAGRASVFRRYPFTIILHDRDGGDVQPMQLKLALGSKTTGVALVAEFQRGKTVVWAAEVQHRGDQIRQALLRRRMLRRGRRYRKTRYRKPRFDNRRRPEGWLPPSLMSRVHNIETWVTRLRRWAPITHLSIQLVSFDTQKLQYPEISGAEYQQGTLYGYEVREYLLEKWGRKCAYCGAENVPLEIDHVFPRSRGGSDRVSNLVLACHRCNQAKGSQLVEEFLAHDEPRLHQIQAQLKLSLRDAAAMNATRWAVFRRLKDTGLPVEAGSGGRTKYNRFSQGYPKAKWIDAACVGESGQHVRLDTQMRVLTIVAKGHGKRQRRITDKYGFPRSHAPSSRSYMGFRTGDLVQAYIPRGKYAGTHVGRIVIRHRPSFRLNGFDVHPKYLTILQRGDGYAYAME

SEQ ID NO: 24552 - protein, 464 aa, synthetic construct; identical to SEQ ID NO: 24525

SEQ ID NO: 24553 - protein, 431 aa, Acidithiobacillus sp.; identical to SEQ ID NO: 24542

SEQ ID NO: 24554 - protein, 455 aa, unidentified
MEIQVVFVLDKRKRPLMPCTEKRARLMLNRGRAVVHKLHPFTIRLKDRVGGDVQPIVLKINPGSKTTGLAVVREMESQRIDEIETIHAVLWTADLNHRGAAIRKAMERRAGFRRRRRSANLRYRQPRFNNRTRPQGWLAPSLQHRVDTTMAWVTRLRKVTPISGVIHQLHRFDTQALQNPEISGVEYQQGTLFGYEVREYLLEKWERQCAYCNAKDTPLQIDHIYPKSKGGSNRISNLTLACQGCNQKKGALPVEQFLAGKPQVLKRIQARAKVPLKDAASVNATRWALFRALKATGLAIAVTTGARTKFNRVRLGIPKSHALDAACGGKVDGITKWATPTLNIRCTGRGAYQRTQVNASGFPRGHLMRVKSVRGFQTGDLARAVVPKGKNAGTHTGRVAVRATGSFNIQIPSGHAVQGISHRYCTLLQRADGYGYFVQPKLIARPEQEAARLAA

SEQ ID NO: 24555 - protein, 427 aa, Acidiferrobacter sp.; identical to SEQ ID NO: 24546

SEQ ID NO: 24556 - protein, 501 aa, synthetic construct
MTGSYTAAPPANGASRTVDVPHRMTGNCTRSVKGKNKMPVCVLSANGERLMPTENYGKVRHLLKDGRAVIAKRNPFTIQLTYDTSTYTQPIEMCVGTGYEHIGVSIKTKAKEVVSQQYDMLTNERSRHDDCRAYRRTRRNRLRYRAARFNNRVSGKKPGWIAPSLDNKVERHLDIISRYLSVMPVTDVFIKAATYDTQLLAALEAGEPVPQGKDYQHGPQYGYDTLREAVFERDHYTCVYCKRGLKDGAILHVHHAYYWKGLHGNSMRELATCCEKCNTPANHKEGGKLWGFDKPLRKYTGEAFMNSVRWILYQRAMARFQGVAEVHMTYGVISKRVRTNLGLPYSCATDAYCMGELRPEARCETEVFQKYRRNNRVLSKFYDAKYYDTREKGVIRSGNELSSGRTNRNHNLDGENLRRFRGCKKSKGRTSTRKQRYAMQPGDIVVYGNRKYVSKGCSSYGRALSLLTDGKPLMVSMKKIQLVRHKGGWVRLPHAAAEAKK

SEQ ID NO: 24557 - protein, 464 aa, synthetic construct
MPVCVLSANGERLMPTENYGKVRHLLKDGRAVIAKRNPFTIQLTYDTSTYTQPIEMCVGTGYEHIGVSIKTKAKEVVSQQYDMLTNERSRHDDCRAYRRTRRNRLRYRAARFNNRVSGKKPGWIAPSLDNKVERHLDIISRYLSVMPVTDVFIKAATYDTQLLAALEAGEPVPQGKDYQHGPQYGYDTLREAVFERDHYTCVYCKRGLKDGAILHVHHAYYWKGLHGNSMRELATCCEKCNTPANHKEGGKLWGFDKPLRKYTGEAFMNSVRWILYQRAMARFQGVAEVHMTYGVISKRVRTNLGLPYSCATDAYCMGELRPEARCETEVFQKYRRNNRVLSKFYDAKYYDTREKGVIRSGNELSSGRTNRNHNLDGENLRRFRGCKKSKGRTSTRKQRYAMQPGDIVVYGNRKYVSKGCSSYGRALSLLTDGKPLMVSVKKIQLVRHKGGWVRLPQAAAGAKE

SEQ ID NO: 24558 - protein, 454 aa, Lactobacillus sp.
MPQKKVEYIYVVDSKGEPVMPTSRLGMVRRWLKSGQAIWYGNSRKTIQFVRPITTNTQELTLGVDAGFHLGLSVVSVDNQREYYASESVRDSKREKEKLEHRRDLRRGRRNRLRHRKKRFKNRKRQKKSLAPSVQHLLDFTIREIKRLYEFLPISKLVVEVAPFDNQKLANPNIKPWEYTQGRMHGFKSVKDYLLARDGYRDALDGKVYPASQLRVHHLVQRKDGGTNQPDNLVLLSDVNHNQANHVDGTLAKLAAERQTDLNTNYRGAYFMSVLAKRLPTYFANYIQTQGYITANLRTLYGIEKSHRNDAFIIAGGTDTCLRTSNIYSRTKVANNNRVLQKFYDARYIDSRDGKIKPGKKLSSGRTKRSRELDYKNQRIYRQEKVTKGRVSIRRNHYQLRPHDIVLNTKTNRIETVRSVVNRGESVVFQTGKSTKPTNVRCLHHINGLREEKM

SEQ ID NO: 24559 - protein, 443 aa, synthetic construct
MMKVFVLDKDHKPLMPCGPARARKLLKAGRARVHKLQPFTIRIVDRSLADSVVQKVVVKVDPGSKETGIAVVREDEEETHHALYFINLKHRGAAIRDALTSRRQLRRGRRSRNLRYRAPRFLNRSKPKGWLPPSLQHRVDTTLSWVNRLRRLAPVSGIAQELVKFDTQRMQNPEISGVEYQQGELAGYELKEYLLEKFGRRCVYCAKSGVPLNVEHIVPKARGGSNRLSNLAIACVECNQKKGARPIDEFLKGKPELLARIRKRLKTPLRDAASVNATRWALFEALRATGLPIRTGSGALTKFNRHCFGVPKEHWFDALCVGRINGVSYEPGMKVLNVSCTGRGQYKRTRTDKFGFPICHFMRTKRPHGVGLGDLVRMTVQKGKHPGIWTGRAFPSNDGRVVLILPEFRIWGRARNCSILSLSDGYGYRLTDSETTKPTSFGK

SEQ ID NO: 24560 - protein, 427 aa, Verrucomicrobium sp.
MMQNRVLVLDSRRQPLMPCHPARARALLKEGRAAVFRSFPFTIILLERASGDVQPVRVKCDPGSKTTGMALVAEFARRGPTVVWAAELTHRGEAIRSALRQRAMHRRSRRNRKTRYRAPRFDNRKRSEGWLPPSLRHRVDTVMSWVGRLRRLAPVTSISQELVRFDTQKMQNPEITGVEYQQGTLAGYEVREYLLEKWGRKCAYCEAKDVPLEIDHIHPRSRGGSDRVSNLTLACHACNQAKGNRDIREFLANRPERLAAILARAKTPLRDAAAINSTRWALCEQLKATSLPVETGSGGRTKYNRSQQGYSKAHWIDAACVGHSGSAVWLDAGMRPLLMEATGHGELQRARVDKHGFPLAHKRGGKSFRDFRTGDLVRCRKPGLPDFLGRVAIRFRPSFVVSGSDRKIEVHPKHLVVVQKADGYAYA

SEQ ID NO: 24561 - protein, 431 aa, unidentified
  source 1..431: note = Bacteroidales bacterium UBA3764
MYIYVQAQDGTPLMPTARAGKVRRMLRDGRAVIATHTPFTIRLTYDTTHHTQSVSLGVDAGTTHIGLSTTTDRKELFAAEIDLRTDIIDNLSTRREARRTRRSKRSIRYRAPRFLNRRTSKRAGLLAPSVQQKVHSHVKAVQDICRLLPVTSVTVEVAQFDTQLLKNPGIVGKQYQQGPQLGFWNVREYVLFRDNHECQHCHGKSKDRILNVHHLESRKTGGDSPDNLVTLCETCHKAYHRGELKLKLKRNSQSLRDAAFMSIMRWKVYNELKQALGVPVHLTYGYLTKYTRIGHTLEKSHAVDARCISGNADARPAGELFRFKQLRRHNRKVMKSNMLKGGHWKHNQAPREIKGFRRYDVVVYKNIQCFINSLRTRGYFSIKTFDGKLISNDNSYKSLGLVRHSGRSLFHKERGLKTRFPALSKDGSTLA

SEQ ID NO: 24562 - protein, 496 aa, Alicyclobacillus sp.
LTSLSQGRRAIGLRYPGHDTLECASQLQALSRAVKQAYGGEASAARMTSRDNIGEAHVTAERRDEEVTLMRQNRVLVLDTHRRPLMPCHPARARQLLKAGRASVFRRYPFTIILHDRNGGDVQPMQLKLAPGSKTTGVALVADFQRGKTVVWAAEIQHRGDQIRQALLRRRMLRRGRRYRKTRYRKPRFDNRRRLEGWLPPSLMSRVHNIETWVARLRRWAPITHLSMQLVSFDTQKLQYPEISGEEYQQGTLYGYEVREYLLEKWGRKCAYCGAENVPLEIDHVIPRSRGGSDRVSNLVLACHRCNQAKANRPVEEFLAHDQERLHRIQAQLKLSLRDAAAMNATRWAVFRRLKDTGLPVEAGSGGRTKYNRFSQGYPKAKWIDAACVGESGQCVRLDTQMQVLTIVAKGHGKRQRCITDKYGFPRSHAPSSRSYMGFRTGDLVQAHVPRGKYAGTHVGRIVIRHRPSFQLNGFNVHPKYLKVLQRGDGYGYAME

SEQ ID NO: 24563 - protein, 433 aa, Sutterella sp.
MINVFVLDKDHKPLMPCRPARARRLLKGGRARVHKLHPFTIRIVDRTLAESAVQPVLIKLDPGSRETGIAVVREDVKKMHYALFFINLRHRGASIRDALTARRQLRRGRRSRNLRYRAPRFLNRRRAEGWLPPSLRHRVDTTKSWVDRLRRLVPAIGLAQELVKFDTQKLENPEISGTEYQQGELAGYELKEYLLEKFGRRCVYCGKSGVPLNVEHIVPKARGGSNRISNLAIACVECNQKKGAKPIEDFLKGKPDLLKRIRSQLKTPLRDASAVNATRWALFNSLKATGLPVSVGSGALTKFNRHLYGVPKEHWLDALCVGETRRAVFDERMQVLEVYCAGRGQYKRTRTDRYGFPVAYFMRTKRPYGVGTGDIVRMSVRSGKHPGVWTGRAFATNDGSVVMLQPDFRVRGRAKNCTILARNDGYGYSLTNS

SEQ ID NO: 24564 - protein, 478 aa, synthetic construct; identical to SEQ ID NO: 24531

SEQ ID NO: 24565 - protein, 436 aa, synthetic construct
MPVCVLSANGERLMPTENYGKVRHLLKDGRAVIAKRNPFTIQLTYETSTYTQPIELCVGTGYEHIGVSIKAKAKEVVSQQYDLLTNERSRHDDCRAYRRTRRNRLRYRAARFNNRVSSKMPGWIAPSLDNKVERHLDIISRYLSVMPVTDVFIKAATYDTQLLAALEAGEPVPQGKDYQHGPQYGFDTLREAVFERDHYTCVYCKRGLKDGAILHVHHAYYWKGLHGNSMRELATCCEKCNTPANHKEGGKLWGFDKPLRKYTGEAFMNSVRWILYQRATARFQGAAEVHMTYGVISKRVRTNLGLPYSCATDAYCMGELRPEARCETEVFQKYRRNNRVLSKFYDAKYYDTREKGVVRSGNELSSGRTNRNHNLDGENLRRFRGCKKSKGRTSTRKQRYAMQPGDIVVYGNRKYASKGCSSYGRALSLLTDGKPL

SEQ ID NO: 24566 - protein, 403 aa, synthetic construct
MAAFFNYPKVFVVDKDGKPLLPTHPARARMLLKKGRASVERMLPFTIRLERVIENPTGVLKAKVTDGSKRVGIALVNEFTGEVVFRGVILLRQNVSRLITLRREYRRNRRYRKVRHRKARFFNRKQLMPPPSIRQKKEVIFRVLKDLSRIAPISGVDVALHSFDISSIVASRKLYGDEYTQSPYEGRTAREKVLNRDGRKCVLCGNETHLQRHHVVFRSWGGTDTPQNQVTLCKKCQREIHVEGKKQTFRSRMFVKFTHAQAGKTYLLGLLEKFGDVRICSGKEIKLWRERFGLEKTSANNALVLFAEKLAKIFGPEYLVLPLRKRKEKNNATKKFSERNGFKHFDVVRAERAGKKVIGCIRSFRSRRPSLILRTFSDNNYEVSLSKTVFICRPRNLVYLSAC

SEQ ID NO: 24567 - protein, 478 aa, synthetic construct
MTGNCTRSVKGKNKMPVCVLSANGERLMPTENYGKVRHLLKDGRAVIAKRNPFTIQLTYDTSTYTQPIEMCVGTGYEHIGVSIKTKAKEVVSQQYDMLTNERSRHDDCRAYRRTRRNRLRYRAARFNNRVSGKKPGWIAPSLDNKVERHLDIISRYLSVMPVTDVFIKAATYDTQLLAALEAGEPVPQGKDYQHGPQYGYDTLREAVFERDHYTCVYCKRGLKDGAILHVHHAYYWKGLHGNSMRELATCCEKCNTPANHKEGGKLWGFDKPLRKYTGEAFMNSVRWILYQRAMARFQGAAEVHMTYGVISKRVRTNLGLPYSCATDAYCMGELRPEARCETEVFQKYRRNNRVLSKFYDAKYYDTREKGVIRSGNELSSGRTNRNHNLDGENLRRFRGCKKSKGRTSTRKQRYAMQPGDIVVYGNRKYVSKGCSSYGKALSLLTDGKPLMVSMKKIQLVRHKGGWVRLPHAAAEAKK

SEQ ID NO: 24568 - protein, 478 aa, synthetic construct
MTGNCTRSVKGKNKMPVCVLSANGERLMPTENYGKVRHLLKDGRAVIAKRNPFTIQLTYDTSTYTQPIEMCVGTGYEHIGVSIKTKAKEVVSQQYDMLTNERSRHDDCRAYRRTRRNRLRYRAARFNNRVSGKKPGWIAPSLDNKVERHLDIISRYLSVMPVTDVFIKAATYDTQLLAALEAGEPVPQGKDYQHGPQYGYDTLREAVFERDHYTCVYCKRGLKDGAILHVHHAYYWKGLHGNSMRELATCCEKCNTPANHKEGGKLWGFDKPLRKYTGEAFMNSVRWILYQRAMARFQGVAEVHMTYGVISKRVRTNLGLPYSCATDAYCMGELRPEARCETEVFQKYRRNNRVLSKFYDAKYYDTREKGVIRSGNELSSGRTNRNHNLDGENLRRFRGCKKSKGRTSTRKQRYAMQPGDIVVYGNRKYVSKGCSSYGRALSLLTDGKPLMVSMKKIQLVRHKGGWVRLPQAAAGAKE

SEQ ID NO: 24569 - protein, 397 aa, Lactococcus sp.; identical to SEQ ID NO: 2318

SEQ ID NO: 24570 - protein, 452 aa, unidentified
MSEIKKVDYIYVVDSNGTPLMPTSRLGMVRRWLKTGQARWFGNSRKTIQFVRPVTTNIQKLTLGVDAGFHLGLSVVGNQREYYAAESLRKSEKDRITSRRELRRTRRNRLRYRKARFDNRRRKDGWLAPSIQHRLDFTIKEIKRLYTFLPITNLVVEVTPFDNQKLLNPSIKSWQYQKGKMYGFKTIKDYLLARDNYRDALDGKQYPASKLRVHHLVQRKDGGSNQPDNLVLLSDVNHNQANHNNGVLAKLRQNRQKSIDYRGAYFMSILATRLSDYFDEYTTTQGYLTANLRQKYRIGKSHLNDAFIIAGGTDVTLRTSNVYSRQKLRNNNRSLQKFYDAKYIDRRDGKQKTGKELSSGRTRRSRELNYTNLRQFRKEKVKKGRVSIRRNHYQLRPHDVVLNTKTNRIERVKSVNSRGKNVILQTGKSSTVKNIVSLYHVNGMLETKVENI

SEQ ID NO: 24571 - protein, 459 aa, Acidithiobacillus sp.
MQNRVLVLDKNRQPLMPCHPARARELLREGKAAVFRRFPFTVILKHREGGDKQELTEKLDPGSKTTGMVLVALFARRGPTAIWAAELEHRGAAIRKSLEQRCGHRRHRRGNLRYREPRFDNRTRPEGWLPPSLQHRVDTTLTWVARCCRWAPVTRLSQELVKFDLQAMQNPEISGTEYQQGTLFGYEVKEYLLEKWGRTCVYCDAENMPLEVDHIHPKGNGGTDRVSNLAVACRDCNQEKSQQPLDLFLKTGKGRRRRMQANAKAFAGKDAKKIARRKIHEETRLQRIRSQAKAPLKDAAAVNSTRWALYTALQQTELPVETGSGGRTKWNRSQQRYPKAHWIDAACAGTSGATVRLNPNHRPMQIGAKGHGERQRARLDKNGFPVGHKTVTKFSWGFQTGDMVMAVVPNGKFAGTHLGRVAIRARPSFALSTAAFEKPFDVHPKYMTILHRSDGYVYN

SEQ ID NO: 24572 - protein, 435 aa, unidentified
  source 1..435: note = Candidatus Methyloumidiphilus alinensis
MNRVFVLGSTKKPLMPCHPARARELLRKGKAAVFRMEPFTIILSGREDGEVQDIEFKASPGGKATGIALVGLFRSGARLLFGAEIAHRGAAVRASLDSRRSLRHGRRGRKTRYRQPRPNFAKRSRRANCGGKWLPPSIKSRVDNAAVWSARLARLAPVACAHVETVRFDTQKLQNPEISGIEYQQGTLAGYEVREYLLEKFKRTCAYCGKQGIPLQIEHIQPIALGGTGRVSNLAIACRPCNEKKAAQPVAQFLADRPDVLKKIKAQAKAPLRDVAALNAARFALGNEIGASGLDTRRWSHGRTKLNRTAQGYAWGKWADAACVGESGAAVYIPANFRPLSIKATGRGTRQVVRTDKYGFPRGAAGQCKRVQGFQTGDLVRLVQPKGKYAGTHVGRLAGIRADGRFDIRADGQKITSGHQNFSLIQRGDGYEYRH

SEQ ID NO: 24573 - protein, 477 aa, synthetic construct
MTGSYTRLREEKKMAVCVLSANGERLMPTENYGKVRHLLKEGRAVIAKRNPFTIQLTYETSTYTQSIEMCVGTGYEHIGVSIKTKAKEVVSQQYDLLTNERSRHDDCRVHRRTRRNHLRYRAARFNNRVSIRKPGWIAPSLDNKVERHLDIISRYLSVMPVTDVFIKAATYDTQLLAALEAGEPVPQGKDYQHGPQYGHDTLREAVFERDHYTCVYCKRGLKDGAILHVHHAYYWKGLHGNSMRELATCCEKCNTPANHKEGGKLWGFDKPLRKYTGEAFMNSVRWILYQRAMAHFQGAADIHMTYGVISKRVRTDLGLPYSCATDAYCMGELRPEARCETEVFQKYRRNNRVLSKFYDAKYYDTREKGVIRSGNELSSGRTNRNHNLDGENLRRFRGCKKSKGRTSTRKQRYALQPGDVVVFGNRKYVSKGCSSYGRELKLLTDGKPLVVSTKKIQLVSHKGGWVRLPQAAAGAKE

SEQ ID NO: 24574 - protein, 426 aa, Verrucomicrobium sp.
MQNRVLVLDNQRQPLMPCHPARARMLLREGKAAVFRRFPFTIIVKERAGGDVQPVRVKCDPGSKTTGMALVAEFARRRPTVAWAAELTHRGETFRGALRQRAACRRSRRNRKTRYRAPRFDNRKRSEGWLPPSLRHRVDTTMTWIGRLRRLAPVSALSQELVRFDMQAMQNPEISGIEHQQGTLAGYEVREYLLEKWGRKCAYCGAKDVPLEIDHIHPKSRGGSDRVSNLTLACHDCNQTKGNRDVGEFLAKRPERLAAILAKAKTPLNDAAAINSTRWALYNRIKATGLPVETGSGGRTKYNRSQQRYPKAHWIDAACVGHSGSAVRLDAGMRPLLMEATGHGERQRARVDKLGFPIAHKRAGKSFRGFRTGDLVRCRKPDLPDFIGRLAIRFRPWFVVSRSDRKIEVHPKDLVVVQKGDGYAYA

SEQ ID NO: 24575 - protein, 416 aa, Lactobacillus sp.
RARWFGNSRKIIQFVRPVTTNTQNLTLGVDAGFHLGLSVVGNQREYYASESLRKSEKDRITSRRELRRTRRGHLRYRQARFDNRRRKDGWLAPSIQHRLDFTIKEIKRLYTFLPITNLVVEVTPFDNQKLANPNIKAWQYQKGKMYGFKTIKDYLLARDNYRDALDGKQYPASQLRVHHLVQRKDGGSNQPDNLVLLSDINHNQANHNNGVLAKLRQNRQKTIDYRGAYFMSILATRLSNYFDEYTTTQGYLTANLRQKYKIEKSHLNDAFVIAGGTDTTLRTNNVYSRQKLRNNNRILQLFYDAKYIDCRDGKQKAGKELSSGRTRRSQELNYDNLRQFRKEKVKKGRVSIRRGHYQLRPHDVVLNTRTNRIERVKGVNSRGKGIVFQSGKYGTVKNVISLYHVNGMLEKKMENI

SEQ ID NO: 24576 - protein, 464 aa, synthetic construct
MPVCVLSANGERLMPTENYGKVRHLLKDGRAVIAKRNPFTIQLTYETSTYTQPIELCVGTGYEHIGVSIKTKAKEVVSQQYDLLTNERSRHDDCRAYRRTRRNRLRYRAARFNNRVSGKKPGWIAPSLDNKVERHLDIISRYLSVMPVTDVFIKAATYDTQLLAALEAGEPVPQGKDYQHGPQYGFDTLREAVFERDHYTCVYCKRGLKDGAILHVHHAYYWKGLHGNSMRELATCCEKCNTPANHKEGGKLWGFDKPLRKYTGEAFMNSVRWILYQRATARFQGAAEVHMTYGVISKRVRTNLGLPYSCATDAYCMGELRPEARCETEVFQKYRRNNRVLSKFYDAKYYDTREKGVVRSGNELSSGRTNRNHNLDGENLRRFRGCKKSKGRTSTRKQRYAMQPGDIVVYGNRKYASKGCSSYGRALSLLTDGKPLVVSMKKIQLVRHKGGWVRLPQAAAGAKE

SEQ ID NO: 24577 - protein, 470 aa, Scytonema sp.
VLLAQNLDKHWRRKLRRKTITYLLGIQIMKVYVVNKHERPLMPTSPRKARLLLKEGKARIYRRDPFAIQLIYGSSGYTQPGNLGIDAGYSNIGYSVVNEKEELIGGEVEMLQGISKCLKERLSYRRQRRNRKRYRAPRFNNRRRKDKWLAPSIQHKLDTHHKLIKRIVEIVPVKKIVIEVASFNIQKIKDASIEGVGYQQGEQYGFDNLREYILHRDGHKCQNPNCKNKSINPILQVHHIGFWKEDRTDRPANLITLCDKCHTPKNHTKNGFLFGWQPKLKPFKGETFMSTVRWRLTNEGEYSSTYGYITKGVRRDFNIEKSHHNDAFVIAGGTTQERIEPLMLEQIRRNKRSMEQFYDAKYIDSRDGSIKSGSELSSGRRIRNKNKNGENLRVYRQRKVSKGQRRIKKSRYRYNSKDFVMFENAVYEVVGMQNLGTGVKLKDYPGVTNKVVNVKKVKPIKRRTGLCTKI

SEQ ID NO: 24578 - protein, 464 aa, synthetic construct
MPVCVLSANGERLMPTENYGKVRHLLKDGRAVIAKRNPFTIQLTYETSTYTQPIELCVGTGYEHIGVSIKAKAKEVVSQQYDLLTNERSRHDDCRAYRRTRRNRLRYRAARFNNRVSSKMPGWIAPSLDNKVERHLDIISRYLSVMPVKDVFIKAATYDTQLLAALEAGEPVPQGKDYQHGPQYGYDTLREAVFERDHYTCVYCKRGLKDGAILHVHHAYYWKGLHGNSMRELATCCEKCNTPANHKEGGKLWGFDKPLRKYTGEAFMNSVRWILYQRATARFQGAAEVHMTYGVISKRVRTNLGLPYSCATDAYCMGELRPEARCETEVFQKYRRNNRVLSKFYDAKYYDTREKGVVRSGNELSSGRTNRNHNLDGENLRRFRGCKKSKGRTSTRKQRYAMQPGDIVVYGNRKYASKGCSSYGRALSLLTDGKPLVVSMKKIQLVRHKGGWVRLPQAAAGAKE

SEQ ID NO: 24579 - protein, 464 aa, synthetic construct
MPVCVLSANGERLMPTENYGKVRHLLKDGRAVIAKRNPFTIQLTYETSTYTQPIELCVGTGYEHIGVSIKTKAKEVVSQQYDLLTNERSRHDDCRAYRRTRRNRLRYRAARFNNRVSGKKPGWIAPSLDNKVERHLDIISRYLSVMPVTDVFIKAATYDTQLLAALEAGEPVPQGKDYQHGPQYGFDTLREAVFERDHYTCVYCKRGLKDGAILHVHHAYYWKGLHGNSMRELATCCEKCNTPANHKEGGKLWGFDKPLRKYTGEAFMNSVRWILYQRATARFQGAAEVHMTYGVISKRVRTNLGLPYSCATDAYCMGELRPEARCETEVFQKYRRNNRVLSKFYDAKYYDTREKGVVRSGNELSSGRTNRNHNLDGENLRRFRGCKKSKGRTSTRKQRYAMQPGDIVVYGNRKYVSKGCSSYGRALSLLTDGKPLVVSMKKIQLVRHKGGWVRLPQAAAGAKE

SEQ ID NO: 24580 - protein, 427 aa, Verrucomicrobium sp.; identical to SEQ ID NO: 24560

SEQ ID NO: 24581 - protein, 464 aa, synthetic construct; identical to SEQ ID NO: 24525

SEQ ID NO: 24582 - protein, 452 aa, unidentified; identical to SEQ ID NO: 24570

SEQ ID NO: 24583 - protein, 459 aa, synthetic construct
LARGTLRQSILWNRLLPDSRKGKDFFMQPHIRAFVLDKDRKPLMPCHAARARKLLKKGKAAVFRRFPFTIILKERTREASAVQDVLVKIDPGSKSTGIAVVRKDKKDVHHALAFICLNHRGSKIRDALTSRRQLRRGRRSRNLRYRAPRFLNRTKPQGSLAPSLRHRVDTVMSWMNRLTRLVPVTGFVQELVKFDTQLMQNAAISGVEYQQGELAGYELKEYLLEKFDRKCVYCGKSGVVLNVEHIIPKARGGSNRVSNLAIACVQCNQKKGAMPIEDFLKKKPALLAQIRKQLKTTLRDAAAVNATRWSLFRSLQSTGCTVEVGSGAQTKFNRHAFSVPKEHWLDALCTGRIDGVADWEKLRPLQAYCIGRGSHKRTRTDKYGFPLCYFSRRKRPNDFGTGDYVRVKVTRGRNAGIWTGRATLTDGKLSVETKAGRVKATFLNSKCLFKSDGYKYQYL

SEQ ID NO: 24584 - protein, 464 aa, synthetic construct; identical to SEQ ID NO: 24525

SEQ ID NO: 24585 - protein, 525 aa, synthetic construct
VLIYLFGLSFGIYSANSTSVDVPHQMTGSYTAAPPQTEHHAVDVPHRMTGNCTRSVKGKNKMPVCVLSANGERLMPTENYGKVRHLLKDGRAVIAKRNPFTIQLTYDTSTYTQPIEMCVGTGYEHIGVSIKTKAKEVVSQQYDMLTNERSRHDDCRAYRRTRRNRLRYRAARFNNRVSGKKPGWIAPSLDNKVERHLDIISRYLSVMPVTDVFIKAATYDTQLLAALEAGEPVPQGKDYQHGPQYGYDTLREAVFERDHYTCVYCKRGLKDGAILHVHHAYYWKGLHGNSMRELATCCEKCNTPANHKEGGKLWGFDKPLRKYTGEAFMNSVRWILYQRAMARFQGVAEVHMTYGVISKRVRTNLGLPYSCATDAYCMGELRPEARCETEVFQKYRRNNRVLSKFYDAKYYDTREKGVIRSGNELSSGRTNRNHNLDGENLRRFRGCKKSKGRTSTRKQRYAMQPGDIVVYGNRKYVSKGCSSYGRALSLLTDGKPLMVSMKKIQLVRHKGGWVRLPHAAAEAKK

SEQ ID NO: 24586 - protein, 478 aa, synthetic construct; identical to SEQ ID NO: 24531

SEQ ID NO: 24587 - protein, 464 aa, synthetic construct; identical to SEQ ID NO: 24525

SEQ ID NO: 24588 - protein, 478 aa, synthetic construct
MTGNCTRSVKGKNKMPVCVLSANGERLMPTENYGKVRHLLKDGRAVIAKRNPFTIQLTYETSTYTQPIELCVGTGYEHIGVSIKTKAKEVVSQQYDMLTNERSRHDDCRAYRRTRRNRLRYRAARFNNRVSGKKPGWIAPSLDNKVERHLDIISRYLSVMPVTDVFIKAATYDTQLLAALEAGEPVPQGKDYQHGPQYGYDTLREAVFERDHYTCVYCKRGLKDGAILHVHHAYYWKGLHGNSMRELATCCEKCNTPANHKEGGKLWGFDKPLRKYTGEAFMNSVRWILYQRAMARFQGVAEVHMTYGVISKRVRTNLGLPYSCATDAYCMGELRPEARCETEVFQKYRRNNRVLSKFYDAKYYDTREKGVIRSGNELSSGRTNRNHNLDGENLRRFRGCKKSKGRTSTRKQRYAMQPGDIVVYGNRKYVSKGCSSYGRALSLLTDGKPLMVSMKKIQLVRHKGGWVRLPHAAAEAKK

SEQ ID NO: 24589 - protein, 433 aa, synthetic construct
MQSHIRAFVLDKDRKPLMPCHAARARKLLKKGKAAVFRRFPFTIILKERTREVSAVQDVLVKIDPGSKSTGIAVVRKDEKNVHHALAFICLNHRGSKIRDALTSRRQLRRGRRSRNLRYRAPRFLNRKKPKGWLAPSLQHRVDAVMSWMNRLTRLVPVAGFVQELVKFDTQLMQNAAISGVEYQQGELAGYELKEYLLEKFDRKCVYCGKSGVVLNVEHIIPKARGGSNRVSNLAIACAQCNQKKGAMPIEDFLKKKPALLAQICKQLKTPLRDAAAVNATRWALYRNLQATGCTVEIGSGALTKFNRHAFSVPKEHWLDALCAGRIDGVADWENLRPLQAYCIGRGSHKRTRTDKYGFPLCYFSRYKRPNDFGTGDYVRVKVTRGRNTGIWIGRATLTDGKLSVETKAGRVKATFLNSKCLFKSDGYKYQYL

SEQ ID NO: 24590 - protein, 478 aa, synthetic construct; identical to SEQ ID NO: 24531

SEQ ID NO: 24591 - protein, 478 aa, synthetic construct
MTGNCTRSVKGKNKMPVCVLSANGERLMPTENYGKVRHLLKDGRAVIAKRNPFTIQLTYDTSTYTQPIEMCVGTGYEHIGVSIKTKAKEVVSQQYDMLTNERSRHDDCRAYRRTRRNRLRYRAARFNNRVSGKKPGWIAPSLDNKVERHLDIISRYLSVMPVTDVFIKAATYDTQLLAALEAGEPVPQGKDYQHGPQYGYDTLREAVFERDHYTCVYCKRGLKDGAILHVHHAYYWKGLHGNSMRELATCCEKCNTPANHKEGGKLWGFDKPLRKYTGEAFMNSVRWILYQRAMARFQGVAEVHMTYGVISKRVRTNLGLPYSCATDAYCMGELRPEARCETEVFQKYRRNNRVLSKFYDAKYYDTREKGVIRSGNELSSGRTNRNHNLDGENLRRFRGCKKSKGRTSTRKQRYAMQPGDIVVYGNRKYVSKGCSSYGRALSLLTDGKPLMVSMKKIQLVRHKGGWVRLPQAAAEAKE

SEQ ID NO: 24592 - protein, 448 aa, Lactobacillus sp.
MSQKKVEHIYVVDSRGEPVMPTSRLGMVRRWLKSGQAIWYGNSRNTIQFVRPITTNAQELTLGVDAGFHLGLSVVGNQREYYASESVRKSEKDKITARREYRRTRRNRLRYRKPRFDNRKRPDSWLAPSIQHRLDFTIKEIKRLYNFLPISKLVIEVSPFDNQKLLNPNIKPWEYTQGKMQGFKDVKDYLLARDVNRDALDGKIYPASQLRVHHLVQRKDGGTNQPDNLVLLSDRNHNQANHNNGVLAKLAQNRQNSIDYKGAYFMSILASRLPNYFDSYIETQGYITANLRKLYGIEKSHLNDAFVIAGGTNQYLRTSNVYSRTKVANNNRSLQKFYDAKYIDSRDGKKKSGKELSSGRTRRSREINYDNQRIYRQEKVSKGRVSIRRQHYQLRPHDIIRNLKTNKIEIVKGVINNGNSVLFQTGKSVTTKKVKCLYHINGLREEKI

SEQ ID NO: 24593 - protein, 445 aa, Microcoleus sp.
MKVYVINRHGRPLMPTTPRKARLLLNRGKAKITGREPFTIQLVYGSSGYTQPVELGIDAGYENIGFSAVNKKEEVIGGELKMLKGMSERITEKRKYRRTRRNRLRYRKPRFSNRRVDKGCLAPSIQHKLDTHHRLIDKIRRILPIIAVTIEVAAYDIQKINNPTIEGEQYQYGEKYGFDNLREYILHRDRHKCQNPNCKNKADDPILQVHHLGFWKNPPDRTDRPANLVTLCTKCHTSKNHQKKGFLFGWEPKLKSFKGETFMTMVRWRLTEEGQHKSTFGYITKGKRRELEIEKSHHNDAFVIAGGRTQSRVTKPLMLEQIRRNKRSMEQFYDAKYRDLRDGKTRSGSELSSGRRTRNINLNGENVRQHRAHKASAGRRSIKKKRYPYKQHDLVLFEGTIYEVIGMQNLGAGVKLKNYPGVKNKVVKPSVVKSIRKRGGLCEVV

SEQ ID NO: 24594 - protein, 478 aa, synthetic construct
MTGNCTRSVKGKNKMPVCVLSANGERLMPTENYGKVRHLLKDGRAVIAKRNPFTIQLTYDTSTYTQPIEMCVGTGYEHIGVSIKTKAKEVVSQQYAMLTNERSRHDDCRAYRRTRRNRLRYRAARFNNRVSGKKPGWIAPSLDNKVERHLDIISRYLSVMPVTDVFIKAATYDTQLLAALEAGEPVPQGKDYQHGPQYGYDTLREAVFERDHYTCVYCKRGLKDGAILHVHHAYYWKGLHGNSMRELATCCEKCNTPANHKEGGKLWGFDKPLRKYTGEAFMNSVRWILYQRAMARFQGVAEVHMTYGVISKRVRTNLGLPYSCATDAYCMGELRPEARCETEVFQKYRRNNRVLSKFYDAKYYDTREKGVIRSGNELSSGRTNRNHNLDGENLRRFRGCKKSKGRTSTRKQRYAMQPGDIVVYGNRKYVSKGCSSYGRALSLLTDGKPLMVSMKKIQLVRHKGGWVRLPHAAAEAKK

SEQ ID NO: 24595 - protein, 478 aa, synthetic construct; identical to SEQ ID NO: 24531

SEQ ID NO: 24596 - protein, 382 aa, synthetic construct
MLTNERSRHDDCRAYRRTRRNRLRYRAARFNNRVSGKKPGWIAPSLDNKVERHLDIISRYLSVMPVTDVFIKAATYDTQLLAALEAGEPVPQGKDYQHGPQYGYDTLREAVFERDHYTCVYCKRGLKDGAILHVHHAYYWKGLHGNSMRELATCCEKCNTPANHKEGGKLWGFDKPLRKYTGEAFMNSVRWILYQRAMARFQGVAEVHMTYGVISKRVRTNLGLPYSCATDAYCMGELRPEARCETEVFQKYRRNNRVLSKFYDAKYYDTREKGVIRSGNELSSGRTNRNHNLDGENLRRFRGCKKSKGRTSTRKQRYAMQPGDIVVYGNRKYVSKGCSSYGRALSLLTDGKPLMVSMKKIQLVRHKGGWVRLPHAAAEAKK

SEQ ID NO: 24597 - protein, 500 aa, synthetic construct; identical to SEQ ID NO: 24543

SEQ ID NO: 24598 - protein, 433 aa, synthetic construct
MQSHIRAFVLDKDRKPLMPCHAARARKLLKKGKAAVFRRFPFTIILKERTREVSAVQDVLVKIDPGSKSTGIAVVRKDEKNVHHALAFICLNHRGSKIRDALTSRRQLRRGRRSRNLRYRAPRFLNRKKPKGWLAPSLQHRVDAVMSWMNRLTRLVPVAGFVQELVKFDTQLMQNAAISGVEYQQGELAGYELKEYLLEKFDRKCVYCGKSGVVLNVEHIIPKARGGSNRVSNLAIACAQCNQKKGAMPIEDFLKKKPALLAQIRKQLKTPLRDATAVNATRWALYRNLQATGCTVEVGSGALTKFNRHAFSVPKEHWLDALCAGRIDGVADWENLRPLQAYCIGRGSHKRTRTDKYGFPLCYFSRYKRPNDFGTGDYVRVKVTRGRNTGIWIGRATLTDGKLSVETKAGRVKATFLNSKCLFKSDGYKYQYL

SEQ ID NO: 24599 - protein, 454 aa, Lactobacillus sp.; identical to SEQ ID NO: 24558

SEQ ID NO: 24600 - protein, 478 aa, synthetic construct
MTGNCTRSVKGKNKMPVCVLSANGERLMPTENYGKVRHLLKDGRAVIAKRNPFTIQLTYDTSTYTQPIEMCVGTGYEHIGVSIKTKAKEVVSQQYDMLTNERSRHDDCRAYRRTRRNRLRYRAARFNNRVSGKKPGWIAPSLDNKVERHLDIISRYLSVMPVTDVFIKAATYDTQLLAALEAGEPVPQGKDYQHGPQYGHDTLRAAVFERDHYTCVYCKRCLKDGAILHVHHAYYWKGLHGNSMRELATCCEKCNTPANHKEGGKLWGFDKPLRKYTGEAFMNSVRWILYQRAMARFQGAVEVHMTYGVISKRVRTDLGLPYSCATDAYCMGELRPEARCETEVFQKYRRNNRVLSKFYDAKYYDTREKGVIRSGNELSSGRTNRNHNLDGENLRRFRGCKKSKGRTSTRKQRYAMQPGDIVVYGNRKYVSKGCSSYGRALSLLTDGKPLMVSTKKIQLVRHKGGWVRLPQAAAGAKE

SEQ ID NO: 24601 - protein, 464 aa, synthetic construct
MPVCVLSANGERLMPTENYGKVRHLLKDGRAVIAKRNPFTIQLTYETSTYTQPIELCVGTGYEHIGVSIKAKAKEVVSQQYDLLTNERSRHDDCRAYRRTRRNRLRYRAARFNNRVSSKMPGWIAPSLDNKVERHLDIISRYLSVMPVKDVFIKAATYDTQLLAALEAGEPVPQGKDYQHGPQYGYDTLREAVFERDHYTCVYCKRGLKDGAILHVHHAYYWKGLHGNSMRELATCCEKCNTPANHKEGGKLWGFDKPLRKYTGEAFMNSVRWILYQRAMARFQGAAEVHMTYGVISKRVRTNLGLPYSCATDAYCMGELRPEARCETEVFQKYGRNNRVLSKFYDAKYYDTREKGVIRSGNELSSGRTNRNHNLDGENLRRFRGCKKSKGRTSTRKQRYAMQPGDIVVYGNRKYVSKGCSSYGKALSLLTDGKPLMVSMKKIQLVRHKGGWVRLPHAAAEAKK

SEQ ID NO: 24602 - protein, 478 aa, synthetic construct; identical to SEQ ID NO: 24531

SEQ ID NO: 24603 - protein, 453 aa, Lactobacillus sp.
MMSEIKKFNYIYVVDSNGTPLMPTSRLGMVRRWLKTGQARWFGNSRKTIQFVRPVTTNTQNLTLGVDAGFHLGLSVVGNQREYYASESLRKSEKDRITSRRELRRTRRGHLRYRQARFDNRRRKDGWLAPSIQHRLDFTIKEIKRLYTFLPITNLVVEVTPFDNQKLANPNIKAWQYQKGKMYGFKTIKDYLLARDNYRDALDGKQYPASQLRVHHLVQRKDGGSNQPDNLVLLSDINHNQANHNNGVLAKLRQNRQKTIDYRGAYFMSILATRLSNYFDEYTTTQGYLTANLRQKYKIEKSHLNDAFVIAGGTDTTLRTNNVYSRQKLRNNNRILQLFYDAKYIDCRDGKQKAGKELSSGRTRRSQELNYDNLRQFRKEKVKKGRVSIRRGHYQLRPHDVVLNTRTNRIERVKGVNSRGKGIVFQNGKYGTVKNVISLYHVNGMLEKKMENI

SEQ ID NO: 24604 - protein, 508 aa, synthetic construct
MVYVLDINGHPLMPTERHGKVKHLLKNGKAKVVKRCPFTIQLLYKSLTYTQSIILGVDAGSKHIGLSATTNDKEFYASDVELRTDIVKLISKRRELRRSRRNRKTRYRQARFDNRKRKDGWLAPSISQKIKCHIKVVENVHKILPITNIVVETASFDIQKIKNPNIKDTEYQQGEQLDFWNVREYVLFRDEHICQCCKGKTKDKILNVHHIESRKTGGNAPNNLITLCETCHKGYHNGTVRLPKTIKRGIIFRDAAFMGIMRWAFYNKLREKYKNVSISTDLAKKDNISLKDITLPRNKKLKMQNWLITGASGGCGKVLALRLKKLGYTVAVTSRDMSRLESMPEGIYKIESQLDSSDTCEKAIQTAIDMKSVAEPYIRGRALRHLEKGRIVIFAAGIGSPYFSTDTTAALRAAEIEADAILMAKNGVDGVYNDDPRKNADAVKFDELTHVEVIKRGLKIMDATASTLSMDNDIDLVVFNMNEPGNIKRVIFGEQIGTTVSNKAESHK

SEQ ID NO: 24605 - protein, 433 aa, synthetic construct
MQPHIRAFVLDKDRKPLMPCHAARARKLLKKGKAAVFRRFPFTIILKERTREASAVQDVVVKVDPGSKGTGLAVVRKDEKNVHHALAFICLSHRGSKIRDALTSRRQLRRGRRSRNLRYRAPRFLNRRKPQGWLAPSLQHRVDTVMSWMNRLTRLVPVTGFVQELVKFDTQLMQNAAISGVEYKQGELAGYELKEYLLEKFDRKCVYCGKSGVVLNVEHIIPKARGGSNRVSNLAIACAQCNQKKGAMPIEDFLKKKPALLAQIRKQLKTPLRDATAVNATRWALYRHLQATGCTVEVGSGALTKFNRHAFSVPKEHWLDALCAGRIDGVADWENLRPLQAYCIGRGSHKRTRTDKYGFPLCYFSRHKRPNDFGTGDYVRVKVTRGRNAGIWIGRATLTNGYLSVETRSFRVQATFKNSQVLFKNDGYKYQYL

SEQ ID NO: 24606 - protein, 464 aa, synthetic construct; identical to SEQ ID NO: 24525

SEQ ID NO: 24607 - protein, 460 aa, synthetic construct; identical to SEQ ID NO: 24549

SEQ ID NO: 24608 - protein, 460 aa, synthetic construct; identical to SEQ ID NO: 24549

SEQ ID NO: 24609 - protein, 401 aa, synthetic construct
MSTCACVLSKNGERLMPTIRLGKVRHLLKDGKAKIIKHHPFTIQLLYDNETNIQPIEICEDVGYNYIGISVKSQSHEYVSVQYDTLQDEKDCHDSCRKMRRIRRNRLRYRKPRFDNRKRNKGWLAPSLEHKKELNVNVIKMYCKVVPITHVTVEVGSFDTMLVKAIQEGKAIPEGADYQKGPRYNLATLREAVFYRDKYTCQVCGRKANEGAILHVHHMFYWKGRHGNSLSELLTVCEKCHTPANHQQGGKLYRFGENIKFAGNINHNVVMVGLYTAGVAHPQAGVLGVGVALRNGFTAHADGVGVLGTPGADQTQIFADGQHLVQWDGDLAGKIDRSAICGRGDSGFQLCPACDGILGGGTGCVVERDFLNGEIIGKGAYFSGNFRVGIAVGFFIFRQFA

SEQ ID NO: 24610 - protein, 460 aa, synthetic construct; identical to SEQ ID NO: 24549

SEQ ID NO: 24611 - protein, 464 aa, synthetic construct; identical to SEQ ID NO: 24525

SEQ ID NO: 24612 - protein, 433 aa, synthetic construct
MQTHIRAFVLDKDRKPLMPCHAARARKLLKKGKAAVFRRFPFTIILKERTREVSVVQDVLVKIDPGSKSTGIAVVRKDKKDVHHALAFICLHHRGSKIRDALTSRRQLRRGRRSRNLRYRSPRFLNRTKPKGWLAPSLQHRVDTVMSWMNRLARLVPVKGFVQELVKFDTQRMQNAAISSVEYQQGELAGYELKEYLLEKFDRKCVYCGKSGIALNVEHIVPKARGGSNRVSNLAIACVQCNQKKGAMPIEDFLKKKPELLARIRRQLKTPLRDATAVNATRWSLFRDLQATGCAVEIGSGALTKFNRHCFNVPKEHWLDALCAGRINGVSDWESLRPLQAYCIGRGSHKRTRTDKYGFPLCFFSRRKRPNDFGTGDYVRVKVTRGRNAGIWTGRATLTDGKLSVETKVGRVKATFQNDKVLFKNDGYKYQYL

SEQ ID NO: 24613 - protein, 448 aa, Microcoleus sp.
MKVYVINRKGRPLMPTTPRKARLLLKSGKAKIVRRTPFSIQLTYGSSGYTQPVNLGIDAGYENIGFSAVNENRELIGGELKMLKGISERITERRKYRRTRRNRLRHRKPRFSNRRIEKGWLAPSIQHKLDTHHRLIHKICRTLPVRTVTIEVAALDIQKIKNPTIVGEQYQYGEQYGFDNLREYILHRDGHKCQNPNCNNKTDKPILQVHHLGFWKNPPDRTDRPANLITLCTKCHTPKNHQKKGFLFGWQPKLKSFKGETFMTMVRWRLTEQGRYESTFGYITKGKRRELEIEKSHHNDAFVIAGGTTQTRVVKPLMLEQIRRNKRSLEQFYDAKYRDIRDGEIRSGGELSSGRRTRNTNLNGENLRQHRAHKVSTGRRAIKRKRYPYKQRDLVLFEGKAYEVIGMQNLGTRLSLKPDTNSKTKYKPAALSKVKPLKRRGGICEQQT

SEQ ID NO: 24614 - protein, 478 aa, synthetic construct
MTGNCTRSVKGKNKMPVCVLSANGERLMPTENYGKVRHLLKDGRAVIAKRNPFTIQLTYDTSTYTQPIEMCVGTGYEHIGVSIKTKAKEVVSQQYDMLTNERSRHDDCRAYRRTRRNRLRYRAARFNNRVSGKKPGWIAPSLDNKVERHLDILSRYLSVMPVTDVFIKAATYDTQLLAALEAGEPVPQGKDYQHGPQYGYDTLREAVFERDHYTCVYCKRGLKDGAILHVHHAYYWKGLHGNSMRELATCCEKCNTPANHKEGGKLWGFDKPLRKYTGEAFMNSVRWILYQRAMARFQGVAEVHMTYGVISKRVRTNLGLPYSCATDAYCMGELRPEARCETEVFQKYRRNNRVLSKFYDAKYYDTREKGVIRSGNELSSGRTNRNHNLDGENLRRFRGCKKSKGRTSTRKQRYAMQPGDIVVYGNRKYVSKGCSSYGRALSLLTDGKPLMVSMKKIQLVRHKGGWVRLPHAAAEAKK

SEQ ID NO: 24615 - protein, 464 aa, synthetic construct; identical to SEQ ID NO: 24525

SEQ ID NO: 24616 - protein, 443 aa, Scytonema sp.; identical to SEQ ID NO: 24526

SEQ ID NO: 24617 - protein, 443 aa, synthetic construct
MMKVFVLDKDHKPLMPCGPARARKLLKAGRARVHKLQPFTIRIVDRSLADSVVQKVVVKVDPGSKETGIAVVREDEEETHHALYFINLKHRGAAIRDALTSRRQLRRGRRSRNLRYRAPRFLNRSKPKGWLPPSLQHRVDTTLSWVNRLRRLAPVSGIAQELVKFDTQLMQNPDISGVEYQQGELAGYELKEYLLEKFGRRCVYCAKSDVPLNVEHIVPKARGGSNRLSNLAIACVECNQKKGAKPIEEFLKGKPELLARVRKQLKTPLRDAASVNATRWALFHALSATGLPVRTGSGALTKYNRHCFGVPKEHWFDALCVGRINGVSYDSCMKVLNVSCTGRGQYKRTRTDKFGFPICHFMRTKRPHGVGLGDLVRMTVQKGKHPGIWTGRAFPSNDGRVVLILPEFRIWGRARNCSILSLSDGYGYRLTDSETTKPTSFGK

SEQ ID NO: 24618 - protein, 478 aa, synthetic construct
MTGNCTRSVKGKNKMPVCVLSANGERLMPTENYGKVRHLLKDGRAVIAKRNPFTIHLTYDTSTYTQPIEMCVGTGYEHIGVSIKTKAKEVVSQQYDMLTNERSRHDDCRAYRRTRRNRLRYRAARFNNRVSGKKPGWIAPSLDNKVERHLDIISRYLSVMPVTDVFIKAATYDTQLLAALEAGEPVPQGKDYQHGPQYGYDTLREAVFERDHYTCVYCKRGLKDGAILHVHHAYYWKGLHGNSMRELATCCEKCNTPANHKEGGKLWGFDKPLRKYTGEAFMNSVRWILYQRAMARFQGVAEVHMTYGVISKRVRTNLGLPYSCATDAYCMGELRPEARCETEVFQKYRRNNRVLSKFYDAKYYDTREKGVIRSGNELSSGRTNRNHNLDGENLRRFRGCKKSKGRTSTRKQRYAMQPGDIVVYGNRKYVSKGCSSYGRALSLLTDGKPLMVSMKKIQLVRHKGGWVRLPHAAAEAKK

SEQ ID NO: 24619 - protein, 427 aa, Alicyclobacillus sp.; identical to SEQ ID NO: 24551

SEQ ID NO: 24620 - protein, 433 aa, synthetic construct
MQSHIRAFVLDKDRKPLMPCHAARARKLLKKGKAAVFRRFPFTIILKERTREVSAVQDVLVKIDPGSKSTGIAVVRKDEKNVHHALAFICLNHRGSKIRDALTSRRQLRRGRRSRNLRYRAPRFLNRKKPKGWLAPSLQHRVDAVMSWMNRLTRLVPVAGFVQELVKFDTQLMQNAAISGVEYQQGELAGYELKEYLLEKFDRKCVYCGKSGVVLNVEHIIPKARGGSNRVSNLAIACAQCNQKKGAMPIEDFLKKKPALLAQIRKQLKTPLRDAAAVNATRWALYRNLQATGCTVEIGSGALTKFNRHAFSVPKEHWLDALCAGRIDGVADWENLRPLQAYCIGRGSHKRTRTDKYGFPLCYFSRYKRPNDFGTGDYVRVKVTRGRNTGIWIGRATLTDGKLSVETKAGRVKATFLNSKCLFKSDGYKYQYL

SEQ ID NO: 24621 - protein, 478 aa, synthetic construct; identical to SEQ ID NO: 24568

SEQ ID NO: 24622 - protein, 430 aa, unidentified; identical to SEQ ID NO: 2314
  source 1..430: note = Candidate division MSBL1 archaeon

SEQ ID NO: 24623 - protein, 433 aa, synthetic construct; identical to SEQ ID NO: 24598

SEQ ID NO: 24624 - protein, 423 aa, unidentified
  source 1..423: note = Thermoplasmata sp.
MSKKVYVQNKNGKPLMPCKPVKARHLLRDGKAEVVQRTPFTIRLKWDCEENTQKVRVGLDTGSKKAGISAVRKDGEVLYQSEVQLRTDIRSKMDRRRRYRRSRRSRKTRHREPKFDNRRRKEGWLPPSLKSKAESMVKAVKKVSEILPVEGVNVEIAPFDMHKVKDPDIEGDEYQNGELKGHTSVRQYVLYRDKDQCINCKKDDVPLQTHHIQPRSEGGTDKPSNMVSLCVECHEELHSGEIELSKRSLKYWRNKEYRFASHVNSMKDHIVDELRKLFDDVKVTFGNMTKAARKKLGLEKSDVNDSIAVALQDFIDKVSVSKLGYTFIKKCLPKGRYRLHKGERSEVSISADNSDYFGFNRWDKVELPNGTVGFVKGRRKSGYFDISDIHGNSYDHSIKHSKLRLIFKADTIITEVKGNSSLQ

SEQ ID NO: 24625 - protein, 460 aa, synthetic construct
LARGTLRQRSILWNRLLPDSRKGKDFFMQPHIRAFVLDKDRKPLMPCHAARARKLLKKGKAAVFRRFPFTIILKERTREASAVQDVLVKIDPGSKSTGIAVVRKDKKDVHHALAFICLNHRGSKIRDALTSRRQLRRGRRSRNLRYRAPRFLNRTKPQGSLAPSLRHRVDTVMSWMNRLTRLVPVTGFVQELVKFDTQLMQNAAISGVEYQQGELAGYELKEYLLEKFDRKCVYCGKSGVVLNVEHIIPKARGGSNRVSNIAIACVQCNQKKGAMPIEDFLKKKPALLAQIRKQLKTTLRDAAAVNATRWSLFRSLQSTGCTVEVGSGAQTKFNRHAFSVPKEHWLDALCTGRIDGVADWEKLRPLQAYCIGRGSHKRTRTDKYGFPLCYFSRRKRPNDFGTGDYVRVKVTRGRNAGIWTGRATLTDGKLSVETKAGRVKATFLNSKCLFKSDGYKYQYL

SEQ ID NO: 24626 - protein, 470 aa, synthetic construct
VKGKNKMPVCVLSANGERLMPTENYGKVRHLLKDGRAVIAKRNPFTIQLTYDTSTYTQPIELCVGTGYEHIGVSIKTKAKEVVSQQYDLLTNERSRHDDCRAYRRTRRNHLRYRAARFNNRVSGKKPGWIAPSLDNKVERHLDIISRYLSVMPVTDVFIKAATYDTQLLAALEAGEPVPQGKDYQHGPQYGYDTLREAVFERDHYTCVYCKRGLKDGAILHVHHAYYWKGLHGNSMRELATCCEKCNTPANHKEGGKLWGFDKPLRKYTGEAFMNSVRWILYQRAMARFQGAAEVHMTYGVISKRVRTNLGLPYSCATDAYCMGELRPEARCETEVFQKYRRNNRVLSKFYDAKYYDTREKGVIRSGNELSSGRTNRNHNLDGENLRRFRGCKKSKGRTSTRKQRYAMQPGDIVVYGNRKYVSKGCSSYGRALSLLTDGKPLMVSMKKIQLVRHKGGWVRLPHAAAEAKK

SEQ ID NO: 24627 - protein, 443 aa, synthetic construct; identical to SEQ ID NO: 24617

SEQ ID NO: 24628 - protein, 478 aa, synthetic construct; identical to SEQ ID NO: 24531

SEQ ID NO: 24629 - protein, 402 aa, synthetic construct
MSISASALRQRQKRSYRSNMICSRTSALAMTTAERTAGRAETACGIGLHGSITVYQAKSPVGLLRLWTTRWSGTWILSPVICLSCLSRMSLSRPRHTIHSSLRRWRQGNLSRRARTISMDRSTATIRCGKRSLNGTTIPVCCKRGLKDGAILHVHHAYYWKGLHGNSMRELATCCEKCNTPANHKEGGKLWGFDKPLRKYTGEAFMNSVRWILYQRAMARFQGVAEVHMTYGVISKRVRTNLGLPYSCATDAYCMGELRPEARCETEVFQKYRRNNRVLSKFYDAKYYDTREKGVIRSGNELSPGRTNRNHNLDGENLRRFRGCKKSKGRTSTRKQRYAMQPGDIVVYGNRKYVSKGCSSYGRALSLLTDGKPLMVSMKKIQLVRHKGGWVRLPHAAAEAKK

SEQ ID NO: 24630 - protein, 464 aa, synthetic construct; identical to SEQ ID NO: 24525

SEQ ID NO: 24631 - protein, 416 aa, unidentified; identical to SEQ ID NO: 24575

SEQ ID NO: 24632 - protein, 478 aa, synthetic construct
MTGNCTRSVKGKNKMPVCVLSANGERLMPTENYGKVRHLLKDGRAVIAKRNPFTIQLTYDTSTYTQPIEMCVGTGYEHIGVSIKTKAKEVVSQQYDMLTNERSRHDDCRAYRRTRRNRLRYRAARFNNRVSSKMPGWIAPSLDNKVERHLDIISRYLSVMPVKDVFIKAATYDTQLLAALEAGEPVPQGKDYQHGPQYGYDTLREAVFERDHYTCVYCKRGLKDGAILHVHHAYYWKGLHGNSMRELATCCEKCNTPANHKEGGKLWGFDKPLRKYTGEAFMNSVRWILYQRAMARFQGVAEVHMTYGVISKRVRTNLGLPYSCATDAYCMGELRPEARCETEVFQKYRRNNRVLSKFYDAKYYDTREKGVIRSGNELSSGRTNRNHNLDGENLRRFRGCKKSKGRTSTRKQRYAMQPGDIVVYGNRKYVSKGCSSYGRALSLLTDGKPLMVSMKKIQLVRHKGGWVRLPHAAAEAKK

SEQ ID NO: 24633 - protein, 455 aa, synthetic construct
MMPTQKQVNYVYVVDANGTPVMPTSRLGMVRRWLKLGQAVWYGNSRTTIQFVRPINTQTQPLTLGVNAGFHLGMAVVGNDREYYASENIRKSEKDRITARREYRRTRRNRLRYRKPRFNNRRRKAGWLAPSVQHRLEFTVREIQRIYKFLPISQLIVEVSPFDNQKLANHDIKPWEYTQGKMHGYQTVKDYLLARDHNRDALDGQFYPASQLRVHHLVQRKDGGTNQPDNLVLLSDVHHNQANHVNGTLAKLAANRQRTIDYRGAYFMSVLASRLNRYFPDYVQTQGYLTANLRTYYGIAKSHLNDAFVIAGGTDQYTRTGNVYRREKLRCNNRRLQKFYDAKYIDRRDGKQKAGKELSSGRTKRSRELNYDNQRIYRLRKVSKGRISIRRQHYRLRPHDIVFNTKIKQIEFVKGVNGNGKNVLLQSGHNVTPRKLICLYHVNGILTAKVPLVLE

SEQ ID NO: 24634 - protein, 478 aa, synthetic construct
MTGNCTRSVKGKNKMPVCVLSANGERLMPTENYGKVRHLLKDGRAVIAKRNPFTIQLTYDTSTYTQPIEMCVGTGYEHIGVSIKTKAKEVVSQQYDMLTNERSRHDDCRAYRRTRRNRLRYRAARFNNRVSGKKPGWIAPSLDNKVERHLDIISRYLSVMPVTDVFIKAATYDTQLLAALEAGEPVPQGKDYQHGPQYGYDTLREAVFERDHYTCVYCKRGLKDGAILHVHHAYYWKGLHGNSMRELVTCCEKCNTPANHKEGGKLWGFDKPLRKYTGEAFMNSVRWILYQRAMARFQGVAEVHMTYGVISKRVRTNLGLPYSCATDAYCMGELRPEARCETEVFQKYRRNNRVLSKFYDAKYYDTREKGVIRSGNELSSGRTNRNHNLDGENLRRFRGCKKSKGRTSTRKQRYAMQPGDIVVYGNRKYVSKGCSSYGRALSLLTDGKPLMVSMKKIQLVRHKGGWVRLPHAAAEAKK

SEQ ID NO: 24635 - protein, 427 aa, Alicyclobacillus sp.
MKQNRVLVLDTNRRPLMPCHPARARQLLKAGRASVFRRYPFTIILHDRDGGDVQPMRLKLAPGSKTTGVALVADFQRGKTVVWAAEIQHRGDQIRQALLRRRMLRRGRRYRKTRYRKPRFDNRRRPEGWLPPSLMSRVHNIETWVARLRRWAPITDLSMQLVSFDTQKLQYPEISGVEYQHGTLYGYEVREYLLEKWGRKCAYCGAENVPLEIDHVIPRSRGGSDRVSNLVLTCHRCNQAKGNRSVEEFLAHDQERLHRIQAQLKLSLRDAAAMNATRWAVYRRLKATGLPVETGSGGRTKYNRFSQGYPKAKWIDAACVGESGQYVGLDTQIQVLMIVTRGHGKRQRCITDKYGFPRSHAPSSRSYMGFRTGDLVRAIIPRGKYTGTHVGRIVIRHRPSFRLNGFDVHPKYLTILQRCDGYGYAME

SEQ ID NO: 24636 - protein, 478 aa, synthetic construct
MTGNCTRSVKGKNKMPVCVLSANGERLMPTENYGKVRHLLKDGRAVIAKRNPFTIQLTYDTSTYTQPIEMCIGTGYEHIGVSIKTKAKEVVSQQYDMLTNERSRHDDCRAYRRTRRNRLRYRAARFNNRVSGKKPGWIAPSLDNKVERHLDIISRYLSVMPVTDVFIKAATYDTQLLAALEAGEPVPQGKDYQHGPQYGYDTLREAVFERDHYTCVYCKRGLKDGAILHVHHAYYWKGLHGNSMRELATCCEKCNTPANHKEGGKLWGFDKPLRKYTGEAFMNSVRWILYQRAMARFQGVAEVHMTYGVISKRVRTNLGLPYSCATDAYCMGELRPEARCETEVFQKYRRNNRVLSKFYDAKYYDTREKGVIRSGNELSSGRTNRNHNLDGENLRRFRGCKKSKGRTSTRKQRYAMQPGDIVVYGNRKYVSKGCSSYGRALSLLTDGKPLMVSMKKIQLVRHKGGWVRLPHAAAEAKK

SEQ ID NO: 24637 - protein, 545 aa, unidentified
  source 1..545: note = Acidobacteria sp.
LILRIDRDTSSRLNQRQGTAAVASIHETHAGVARMTPHGQLRPLHPAADDGTGNRSRRTTAAGPDPGPVRSITRGEAEDPATGPGSTGPAARKRQHPPARANRVFVVGSDGRPLMPCTVRRARRLIDAGRVRRRDYRPFTIHLKDRCATDGRTAVQPVEVRCAPGRRRTGIAVVATLDEEDRVLYQEEIEHRTDITRKLVERKTHRRRRRGTKWFRKQRFDNRRRPAGWLPPSIQSVVANQEHRIERLAGRSGANTITIQTAKFDTHRILYPKVEGTGYQRGPLYRRHLREYIAAQWQHRCAYCGKGDWEDATRFNLDHVEPRTAGGPDNVRNLVWSCQPCNERKGERPVHEFLRENPERLARVLRQHPVPLAAAGQHAAICQTLVRKVQNTGREVLETTGADTSHVRSEAGIDKSHPNDAACCGSNNAIRNVGAPAKLKAIGHGRRKQIKSLPIGPYLAWRHEKPTVRRATPCPGHARRPNHVHGIRSGDLVEIRTRNGLKKGSAQVEASTRRVYVRTADGKASTSKATHIRKIAPRNGYRKSD

SEQ ID NO: 24638 - protein, 478 aa, synthetic construct; identical to SEQ ID NO: 24531

SEQ ID NO: 24639 - protein, 443 aa, synthetic construct
MMKVFVLDKDHKPLMPCGPARARKLLKAGRARVHKLQPFTIRIVDRSLADSVVQKVVVKVDPGSKETGIAVVREDEEETHHALYFINLKHRGAAIRDALTSRRQLRRGRRSRNLRYRAPRFLNRSKPKGWLPPSLQHRVDTTLSWVNRLRRLAPVSGIAQELVKFDTQRMQNPEISGVEYQQGELAGYELKEYLLEKFGRRCVYCAKSGVPLNVEHIVPKARGGSNRLSNLAIACVECNQKKGARPIEEFLKGKPELLARIRKRLKTPLRDAASVNATRWALFEALRATGLPIRTGSGALTKFNRHCFGVPKEHWFDALCVGRINGVSYEPGMKVLNVSCTGRGQYKRTRTDKFGFPICHFMRTKRPHGVGLGDLVRMTVQKGKHPGIWTGRAFPSNDGSVVLILPEFRIKGRARNCSILSLSDGYGYRLTDSETTKPTSFGK

SEQ ID NO: 24640 - protein, 464 aa, synthetic construct; identical to SEQ ID NO: 24576

SEQ ID NO: 24641 - protein, 454 aa, Lactobacillus sp.; identical to SEQ ID NO: 24536

SEQ ID NO: 24642 - protein, 443 aa, Scytonema sp.
MKVYVVNKYGKPLMPTSPRKARLLLKEGKAKISSRDPFTIQLIYGSSGYTQPGALGIDAGYENIGYSVVNEKEELIGGEVRMLKGMSERLTERTKYRCQRRNRKRYRAPRFDNRRCQENWLAPSIKHKLDTHQKILDKIQKIVPVKEVAVEVASFDIQKIKNAEISGVGYQKGEQYGFDNLREYILHRDQHKCQNPNCKNKDTNPILEVHHLGFWKEDRTDRPANLITLCDKCHTPKNHKKSGFLFGWEPKLKSFKGETFMTTVRWRLTNNGEHSSTYGYITKGIRREFKIEKSHHNDAFVIAGGTTQKRVESLILEQIRRNKRSMEQFYDAKYIDARDGSTKSGSELSSGRRTRNKQKNGENLRAYRQRKISKGQRRIKKSRYRYQPKDLVQFEGKVYEVVGMQNLGTGVKLKNYPGIKNKVVNVNKVYSIKRRSGLCQIVP

SEQ ID NO: 24643 - protein, 433 aa, synthetic construct; identical to SEQ ID NO: 24563

SEQ ID NO: 24644 - protein, 478 aa, synthetic construct; identical to SEQ ID NO: 24531

SEQ ID NO: 24645 - protein, 416 aa, Lactobacillus sp.; identical to SEQ ID NO: 24575

SEQ ID NO: 24646 - protein, 464 aa, synthetic construct; identical to SEQ ID NO: 24525

SEQ ID NO: 24647 - protein, 427 aa, Alicyclobacillus sp.; identical to SEQ ID NO: 24635

SEQ ID NO: 24648 - protein, 433 aa, synthetic construct
MINVFVLDKDHKPLMPCRPARARRLLKGGRARVHKLHPFTIRIVDRTLAKSAVQPVLIKLDPGSRETGIAVVREDVKKMHYALFFINLRHRGASIRDALTARRQLRRGRRSRNLRYRAPRFLNRRRAEGWLPPSLRHRVDTTKSWVDRLRRLVPAIGLAQELVKFDTQKLENPEISGTEYQQGELAGYELKEYLLEKFGRRCVYCGKSGVPLNVEHIVPKARGGSNRISNLAIACVECNQKKGAKPIEDFLKGKPDLLKRIRSQLKTPLRDASAVNATRWALFNSLKATGLPVSVGSGALTKFNRHLYGVPKEHWLDALCVGETRRAVFDERMQVLEVYCAGRGQYKRTRTDRYGFPVAYFMRTKRPYGVGTGDIVRMSVRSGKHPGVWTGRAFATNDGSVVMLQPDFRVRGRAKNCTILARNDGYGYSLTNS

SEQ ID NO: 24649 - protein, 360 aa, Lactobacillus sp.
KDRITSRRELRRTRRNRLRYRKARFDNRRRKDGWLAPSIQHRLDFTIKEIKRLYTFLPITNLVVEVTPFDNQKLLNPSIKSWQYQKGKMYGFKTIKDYLLARDNYRDALDGKQYPASKLRVHHLVQRKDGGSNQPDNLVLLSDVNHNQANHNNGVLAKLRQNRQKSIDYRGAYFMSILATRLSDYFDEYTTTQGYLTANLRQKYRIGKSHLNDAFIIAGGTDVTLRTSNVYSRQKLRNNNRSLQKFYDAKYIDRRDGKQKTGKELSSGRTRRSRELNYTNLRQFRKEKVKKGRVSIRRNHYQLRPHDVVLNTKTNRIERVKSVNSRGKNVILQTGKSSTVKNIVSLYHVNGMLETKVENI

SEQ ID NO: 24650 - protein, 478 aa, synthetic construct
MTGNCTRSVKGKNKMPVCVLSANGERLMPTENYGKVRHLLKDGRAVIAKRNPFTIQLTYDTSTYTQPIEMCVGTGYEHIGVSIKTKAKEVVSQQYDMLTNERSRHDDCRAYRRTRRNRLRYRAARFNNRVSGKKPGWIAPSLDNKVERHLDIISRYLSVMPVTDVFIKAATYDTQLLAALEAGEPVPQGKDYQHGPQYGYDTLREAVFERDHYTCVYCKRGLKDGAILHVHHAYYWKGLHGNSMRELATCCEKCNTPANHKEGGKLWGFDKPLRKYTGEAFMNSVRWILYQRAMARFQGVAEVHMTYGVISKRVRTNLGLPYSCATDAYCMGELRPEARCETEVFQKYRRNNRVLSKFYDAKYYDTREKGVIRSGNELSSGRTNRNHNLDGENLRRCRGCKKSKGRTSTRKQRYAMQPGDIVVYGNRKYVSKGCSSYGRALSLLTDGKPLMVSMKKIQLVRHKGGWVRLPHAAAEAKK

SEQ ID NO: 24651 - protein, 323 aa, synthetic construct
LVQCWYVTLARGTLRQRSILWNRLLPDSRKGKDFFMQPHIRAFVLDKDRKPLMPCHAARARKLLKKGKAAVFRRFPFTIILKERTREASAVQDVLVKIDPGSKSTGIAVVRKDKKDVHHALAFICLNHRGSKIRDALTSRRQLRRGRRSRNLRYRAPRFLNRTKPQGSLAPSLRHRVDTVMSWMNRLTRLVPVTGFVQELVKFDTQLMQNAAISGVEYQQGELAGYELKEYLLEKFDRKCVYCGKSGVVLNVEHIIPKARGGSNRVSNLAIACVQCNQKKGAMPIEDFLKKKPALLAQIRKQLKTTLRDAGAVNAARWALRRE

SEQ ID NO: 24652 - protein, 464 aa, synthetic construct; identical to SEQ ID NO: 24576

SEQ ID NO: 24653 - protein, 478 aa, synthetic construct
MTGNCTRSVKGKNKMPVCVLSANGERLMPTENYGKVRHLLKDGRAVIAKRNPFTIQLTYDTSTYTQPIEMCVGTGYEHIGVSIKTKAKEVVSQQYDMLTNERSRHDDCRAYRRTRRNRLRYRAARFNNRVSGKKPGWIAPSLDNKVERHLDIISRYLSVMPVTDVFIKAATYDTQLLAALEAGEPVPQGKDYQHGPQYGYDTLREAVFERDHYTCVYCKRGLKDGAILHVHHAYYWKGLHGNSMRELATCCEKCNTPANHKEGGKLWGFDKPLRKYTGEAFMNSVRWILYQRAMARFQGVAEVHMTYGVISKRVRTNLGLPYSCATDAYCMGELRPEARCETEVFQKYRRNNRVLSKFYDAKYYDTREKGVIRSGNELSSGRTNRNHNLDGENLRRFRGCKKSKGRTSTRKQRYAMQPGDIVVYGNRKYVSKGCSSYGRALSLLTDGKPLMVSVKKIQLVRHKGGWVRLPQAAAGAKE

SEQ ID NO: 24654 - protein, 522 aa, synthetic construct
MTGSYTAAPPQTEHHAVDVPHQMTGSYTVKRRKRFPTVVDIPHRMTGNCTRSVKGKNKMPVCVLSANGERLMPTENYGKVRHLLKDGRAVIAKRNPFTIQLTYDTSTYTQPIEMCVGTGYEHIGVSIKTKAKEVVSQQYDLLTNERSRHDDCRAYRRTRRNHLRYRAARFNNRVSSKKPGWIAPSLDNKVERHLDIISRYLSVMPVTDVFIKAATYDTQLLAALEAGEPVPQGKDYQHGPQYGYDTLREAVFERDHYTCVYCKRGLKDGAILHVHHAYYWKGLHGNSMRELATCCEKCNTPANHKEGGKLWGFDKPLRKYTGEAFMNSVRWILYQRAMARFQGVAEVHMTYGVISKRVRTNLGLPYSCATDAYCMGELRPEARCETEVFQKYRRNNRVLSKFYDAKYYDTREKGVIRSGNELSSGRTNRNHNLDGENLRRFRGCKKSKGRTSTRKQRYAMQPGDIVVYGNRKYVSKGCSSYGKALSLLTDGKPLMVSMKKIQLVRHKGGWVRLPHAAAEAKK

SEQ ID NO: 24655 - protein, 453 aa, Lactobacillus sp.; identical to SEQ ID NO: 24539

SEQ ID NO: 24656 - protein, 433 aa, synthetic construct; identical to SEQ ID NO: 24537

SEQ ID NO: 24657 - protein, 478 aa, synthetic construct
MTGNCTRSVKGKNKMPVCVLSANGERLMPTENYGKVRHLLKDGRAVIAKRNPFTIQLTYDTSTYTQPIEMCVGTGYEHIGVSIKTKAKEVVSQQYDMLTNERSRHDDCRAYRRTRRNRLRYRAARFNNRVSGKKPGWIAPSLDNKVERHLDIISRYLSVMPVTDVFIKAATYDTQLLAALEAGEPVPQGKDYQHGPQYGYDTLREAVFERDHYTCVYCKRGLKDGAILHVHHAYYWKGLHGNSIRELATCCEKCNTPANHKEGGKLWGFDKPLRKYTGEAFMNSVRWILYQRAMARFQGVAEVHMTYGVISKRVRTNLGLPYSCATDAYCMGELRPEARCETEVFQKYRRNNRVLSKFYDAKYYDTREKGVIRSGNELSSGRTNRNHNLDGENLRRFRGCKKSKGRTSTRKQRYAMQPGDIVVYGNRKYVSKGCSSYGRALSLLTDGKPLMVSMKKIQLVRHKGGWVRLPHAAAEAKK

SEQ ID NO: 24658 - protein, 443 aa, synthetic construct
LVQCWYVTLARGTLRQRSILWNRLLPDSRKGKDFFMQPHIRAFVLDKDRKPLMPCHAARARKLLKKGKAAVFRRFPFTIILKERTREASAVQDVVVKVDPGSKSTGLAVVRKDEKNVHHALAFICLDHRGSKIRDALTSKRQLRRGRRSRNLRYRAPRFLNRTKPQGSLAPSLRHRVDTVMSWMNRLTRLVPVTGFVQELVKFDTQLMQNAAISGVEYQQGELAGYELKEYLLEKFDRKCVYCGKSGVVLNVEHIIPKARGGSNRVSNLAIACVQCNQKKGAMPIEDFLKKKPALLAQIRKQLKTTLRDAAAVNATRWSLFRSLQSTGCTVEVGSGAQTKFNRHAFSVPKEHWLDALCTGRIDGVADWEKLRPLQAYCIGRGSHKRTRTDKYGFPLCYFSRHKRPNDFGTGDYVRVKVTRGRNAGIWTGRATLTDGKLSVETK

SEQ ID NO: 24659 - protein, 478 aa, synthetic construct
MTGNCTRSVKGKNKMPVCVLSANGERLMPTENYGKVRHLLKDGRAVIAKRNPFTIQLTYDTSTYTQPIEMCVGTGYEHIGVSIKTKAKEVVSQQYDMLTNERSRHDDCRAYRRTRRNRLRYRAARFNNRVSGKKPGWIAPSLDNKVERHLDIISRYLSVMPVTDVFIKAATYDTQLLAALEAGEPVPQGKDYQHGPQYGYDTLREAVFERDHYTCVYCKRGLKDGAILHVHHAYYWKGLHGNSMRELATCCEKCNTPANHKEGGKLWGFDKPLRKYTGEAFMNSVRWILYQRAMARFQGVAEVHMTYGVISKRVRTNLGLPYSCATDAYCMGELRPEARCEIEVFQKYRRNNRVLSKFYDAKYYDTREKGVIRSGNELSSGRTNRNHNLDGENLRRFRGCKKSKGRTSTRKQRYAMQPGDIVVYGNRKYVSKGCSSYGRALSLLTDGKPLMVSMKKIQLVRHKGGWVRLPHAAAEAKK

SEQ ID NO: 24660 - protein, 748 aa, synthetic construct
MNETAINNAIRELEEMTNLLRKILERKITQKQAADKLGITPQAFQTELKNSFSNYIKKRNIITEDLLLKCLEEIETPCERIAKDIFGIAEYEKLVIIDTENQELFLQRMKDILSEREMSIMSLRYGINTDEPMTLRKIGEQFGVEQQRIRQILDKCLHKLRNPANSRLLLPNYQRYAKALQSCQEVQAVSDNLEKAYERTVEKYTWLLHKKELVDKAPEIRRQLENMIQISDMVIPENWKEILKSKGIITVFDYIEADHAELEKTKEFCPDFSCSVLDTMFGIPTQEVNSIAASAIQISTLNLSTRTFNALYRAGIRTLGDLTKKSREEIMELRNFGRSCYEELETILSKYNISLMEEIGLRDSMSKRKLLESRASSRRGRRYRKTRYRHPKWKPKTKRTYNEKADRKGRHWKKQKNTFTSKRQAGWLPPSLQSKTDHHIQWIRKLLDLLPEGYRLSIELGRFDPARMKDPEIHGELYQKGPQYDYENVRAYVLARDGYTCRVCKKKGGKLHVHHILYRSRGASDNPKYMAAVCSKCHTTENHLPGGILYQWMQDQKKFTRGLRDATFMNILKKRLRKAFPDAVFTYGNITKADREKLELPKSHGNDATAIALVKTEVKSVKDEEPVIHIQQVRRKKRSLHEETPRKGRKEPNRTASRSDKNTKSVTVTKGSGEKKASMTACLFDRVELDGKKGWITGFTGTSCYVKDKEDNYICTSPKYKQVSISRLRILHHCGNWAIGAEKPLGKG

SEQ ID NO: 24661 - protein, 478 aa, synthetic construct
MTGNCTRSVKGKNKMPVCVLSANGERLMPTENYGKVRHLLKDGRAVIAKRNPFTIQLTYDTSTYTQPIEMCVGTGYEHIGVSIKTKAKEVVSQQYDMLTNERSRHDDCRAYRRTRRNRLRYRAARFNNRVSGKKPGWIAPSLDNKVERHLDIISRYLSVMPVTDVFIKAATYDTQLLAALEAGEPVPQGKDYQHGPQYGYDTLREAVFERDHYTCVYCKRGLKDGAILHVHHAYYWKGLHGNSMRELATCCEKCNTPANHKEGGKLWGFDKPLRKYTGEAFMNSVRWILYQRAMARFQGVAEVHMTYGVISKRVRTNLGLPYSCATDAYCMGELRPEARCETEVFQKYRRNNRVLSKFYDAKYYDTREKGVIRSGNELSSGRTNRNHNLDGENLRRFRGCKKSKGRTSTRKQRYVMQPGDIVVYGNRKYVSKGCSSYGRALSLLTDGKPLMVSMKKIQLVRHKGGWVRLPHAAAEAKK

SEQ ID NO: 24662 - protein, 433 aa, unidentified
MINVFVLDKDHKPLMPCQPARARRLLRAGRARVHKLHPFTIRLVDRTLADSAVQPVLIKLDPGSKETGIAVVREDEKKTHHALFFINLRHRGASIRDALTARRQLRRGRRSRNLRYRAPRFLNRRRPDGWLPPSLQHRVDTTKSWVDRLRRLVPVSGLAEELVKFDTQKLQNPEISGREYQQGELAGYELKEYLLEKFSRRCVYCRKSGVPLNVEHIVPKARGGSNRVSNLAIACVECNQKKGSKPIEDFLKGNPDLLKRILSQLKTPLRDASAVNSTRRALFNALKETGLPVSVGSGALTKFNRHLYGVPKEHWLDALCVGETRGVVFDERMQVLEIHCAGRGQYKRTRTDRYGFPIAYFMRTKRPHGVGTGDIVRMSVRGGKHPGLWTGRATAKNSGTVVLQMPEFQIGGRAKNCTILARNDGYGYSLTNS

SEQ ID NO: 24663 - protein, 524 aa, unidentified
  source 1..524: note = Acidobacteria sp.
VASIHETHAGVARVTPHGQLRPLHPEADDGAGTRSRRTTTAGPDPGPVRSITRGEAEDPETGPGSTRPAARKRQHTPRRANRVFVIGSDGKPLMPCTVRRARQLIDAGRVRRRDYRPYTIHLKDRCTGDGRTAVQPVEVRCRPGPRHTGIAVVATLDDHDRVLYQEEIDHRTDISRRLIQRKAHRRRRRATKWFRKPRFDNRRRPAGWLPPSIESVVSNQQHRIERLAQRSGASTACIQTGKFDTHKILDPSVSGKGYQQGPLYQRHLREYIATQYDHRCVYCGKGDWEDATRFNLDHIVPRSAGGATNIRNLVWSCQPCNQRKGDRPVREFLRENPERINAVLRQRPVPLAAAGQYAAICKRLVRRLEDSGLETSETTGADTAHARSAAGIVKTHANDAACCRSSGEIDSLRTPTTLKAAGHGRRKQIKSLPVGPYLAWRHQKPTTRRATPCPGHARHPNHVHRIRTGDTVRILTTDGWRKGEAQVEASRQRVHVRTSQARYSTSKATHIRRIATANGYRESN

SEQ ID NO: 24664 - protein, 478 aa, synthetic construct; identical to SEQ ID NO: 24531

SEQ ID NO: 24665 - protein, 464 aa, synthetic construct
MAVCVLSANGERLMPTENYGKVRHLLKDGRAVIAKRNPFTIQLTYDTSTYTQPIEMCVGTGYEHIGVSIKTKAKEVVSQQYDLLTNERSRHDDCRAYRRTRRNRLRYRAARFNNRVSSKKPGWIAPSLDNKVERHLDIISRYLSVMPVKDVFIKAATYDTQLLAALEAGEPVPQGKDYQHGPQYGYDTLREAVFERDHYTCVYCKRGLKDGAILHVHHAYYWKGLHGNSMRELATCCEKCNTPANHKEGGKLWGFDKPLRKYTGEAFMNSVRWILYQRAMARFQGAAEVHMTYGVISKRVRTDLGLPYSCATDAYCMGELRPEARCETEVFQKYRRNNRVLSKFYDAKYYDTREKGVIRSGNELSSGRTNRNHNLDGENLRRFRGCKKSKGRTSTRKQRYAMQPGDIVVYGNRKYVSKGCSSYGRALSLLTDGKPLMVSMKKIQLVRHKGGWVRLPHAAAEAKK

SEQ ID NO: 24666 - protein, 452 aa, Lactobacillus sp.; identical to SEQ ID NO: 24570

SEQ ID NO: 24667 - protein, 435 aa, unidentified
  source 1..435: note = Bacterium sp.
MAVLILDKRKNPLMPCSEKRARLLLERGRARVHRKAPFIIRLVDRGVEDSALQPLRLKLDPGSKTTGIALVRERETVDPATGKSTRAQAVVFLAELAHRGHLIRDRLTARRAFRRRRRGTLRYRAPRFLNRTRPRGWLAPSLRHRVDTTMAWVDRLMRWAPVAGLSTLLHRFDTQALQNPEISGIEYQQGTLTGYEVREYLLEKWGWRCAYCDVENVPLTVDHIHPKSRGGSDRVSNLALACVPCNQRKGNRDVTEFLLHDPKRLAHIEAQRKAPLKDAAAVNSTRWALLGRLKETGLDVEVGTGGRTKYNRARQQCPKTHWVDAACGGPPGALVRLDPETKPLAIRATGHGERQRARLNRYGFPRGHKPRRRSFLGWRTGAIARCDKPGVRAFVGRVAIRFRPSFVITGPDGKKAETHPKYLHIVQKGDGYAYA

SEQ ID NO: 24668 - protein, 478 aa, synthetic construct; identical to SEQ ID NO: 24531

SEQ ID NO: 24669 - protein, 608 aa, Streptomyces sp.
VTRVGYVPRRTEDPPPVLPQQLALEFESADNPGIRDETGLERRKAPGVKHVRGETTSSTPAAGGVTPDHQVREPGREADPAVFVLDKHGTPLQPTTPARARKLLASGRAVVARHTPFVIRLKDRTANHSQVDGVEIGIDPGSKHTGIAVFTTVTGERRGRYSIQLDHRGAAIRKKLERRAAYRRGRRTRNLRYRAPRFLNRTRPKGWLPPSLRHRVDTTTSWVDRLARWAPVKAVHVERVAFDTNAISAGRPLEGAEYQHGTLHGTEVREYLLAKFGRACVYCGAMGVPLNIDHIRPRSRGGSDRVANLTLACIPCNQAKSSRPVEEFAPKRAAEILKRAKAPLRDAAAVNATTWALWRPWTHACPPAPRPAGAPSGTAPGAPCPTPTPWTPSPSANSTPSPPGPAPSWSSGRPDAASTSAPAPTSTASPAYACPASSSSSATPPATSSGPSSPRGRTRAPTPAASPSAPPGTSPSEPQAASTPPGTSTSASSSEPTATPTPANPKEPRLDPRPRFIQRRSARRRTAYPPPRSAEASFPPRPEDRGIHEGHPMTVRVYSVDRSGVVAWERPEVRVTTAEPPDVLGSSLNWPLCACERATGTPCPAGRA

SEQ ID NO: 24670 - protein, 460 aa, synthetic construct; identical to SEQ ID NO: 24549

SEQ ID NO: 24671 - protein, 452 aa, unidentified; identical to SEQ ID NO: 24570

SEQ ID NO: 24672 - protein, 433 aa, synthetic construct
MQSHIRAFVLDKDRKPLMPCHAARARKLLKKGKAAVFRRFPFTIILKERTREVSAVQDVLVKIDPGSKSTGIAVVRKDEKNVHHALAFICLNHRGSKIRDALTSRRQLRRGRRSRNLRYRAPRFLNRKKPKGWLAPSLQHRVDAVMSWMNRLTRLVPVAGFVQELVKFDTQLMQNAAISGVEYQQGELAGYELKEYLLEKFDRKCVYCGKSGVVLNVEHIIPKARGGSNRVSNLAIACAQCNQKKGAMPIEDFLKKKPALLAQIRKQLKTPLRDATAVNATRWALYRNLQATGCTVEVDSGALTKFNRHAFSVPKEHWLDALCAGRIDGVADWENLRPLQAYCIGRGSHKRTRTDKYGFPLCYFSRYKRPNDFGTGDYVRVKVTRGRNTGIWIGRATLTDGKLSVETKAGRVKATFLNSKCLFKSDGYKYQYL

SEQ ID NO: 24673 - protein, 464 aa, synthetic construct; identical to SEQ ID NO: 24525

SEQ ID NO: 24674 - protein, 442 aa, unidentified
  source 1..442: note = Symploca sp.
MKVCVVNIGERPLMPTTPRKAKILLREGAAKIFRRDPFTIQLLSDCHGYIQPATLGIDAGYLNIGYSALNQTAELIGGEVKMLEGISERITEKLKYRRTRRNRLRYRAPRFDNRRRNDGWLTPSIQHKLDTHHRLIDRIKSVLPIDEVMIEVANFDIQKIKNQEISGDGYQQGEQKGFDNLREYLLHRDGHKCQHPECRNKSKQPILQVHHLGFWKNPPDRTERPGNLITLCNKCHTPAQHKKKGKLFGWEPKIKPFKPETFMSTVRWRLTKDTGYKVTFGYITKAKRRLLKLDKSHHNEAFVIAGGEYQTRCEALNLVQIRRNKRSMEQFYDAKYLDIRDKKSKSGTELFSGRRTRNKNLNSENLRAYRGHKLFKGQRRVKKLRYRYQPHDEVEFEGAVFEVVGMQNQGTGVKLKDYPGIKNKVVKISAVKSVKKRGGICA

SEQ ID NO: 24675 - protein, 464 aa, synthetic construct; identical to SEQ ID NO: 24601

SEQ ID NO: 24676 - protein, 480 aa, synthetic construct
MEKRCEMAVYVLDKKKQPLMPCSEKRARLLLERGRAVVHKIYPFTIRLKDRVGGALQPLRLKIGPASHKTGIALVRESETVDPVTGEVQRVEHVINLIDLEHRGGLISKKLEQRSNMRGGRRHRKTRYRPARFNNRSRPEGWLPPSLQHRVDTTESWCNRLTSLAPITAISTMLHRFDTQKLQDPEISGIEYQQGTLFGYEVREYLLEKWGRTCTYCDADDKPLQVEHILAKANGGTDRISNLTLACEPCNQEKGKLFLPEFLSTGKKRFRRFERNARHFATTGKGNIDAKKLAERKQHEVTRLARIQAQAKAPLKDVAAINATRAAVLRMLEGTGLPVEISTGGRAKWNRTRFSIPKRHALDAACMGQVDRIEDWDRPYWRVHCDGRGQYQRTNLDKKGRRVGFLPRQKQHHGFQTGDMVRAEVANGVHKGIHMGRVAVRSSGSFKMRTKTGLHDGVKAEDCRLIQRSDGYSYFREHVA

SEQ ID NO: 24677 - protein, 464 aa, synthetic construct
MAVCVLSANGERLMPTENYGKVRHLLKDGRAVIAKRNPFTIQLTYDTSTYTQPIEMCVGTGYEHIGVSIKTKAKEVVSQQYDLLTNERSRHDDCRAYRRTRRNRLRYRAARFNNRVSGKKPGWIAPSLDNKVERHLDIISRYLSVMPVKDVFIKAATYDTQLLAALEAGEPVPQGKDYQHGPQYGYDTLREAVFERDHYTCVYCKRGLKDGAILHVHHAYYWKGLHGNSMRELATCCEKCNTPANHKEGGKLWGFDKPLRKYTGEAFMNSVRWILYQRAMARFQGAAEVHMTYGVISKRVRTNLGLPYSCATDAYCMGELRPEARCETEVFQKYRRNNRVLSKFYDAKYYDTREKGVIRSGNELSSGRTNRNHNLDGENLRRFRGCKKSKGRTSTRKQRYAMQPGDIVVYGNRKYVSKGCSSYGRALSLLTDGKPLMVSTKKIQLVRHKGGWVRLPHAAAEAKK

SEQ ID NO: 24678 - protein, 433 aa, synthetic construct
MQSHIRAFVLDKDKKPLMPCHAAKARKLLKKGKAAVFRRFPFTIILKERTREASAIQDVLVKVDPGSKSTGLAVVRKDEKNLHHALAFICLNHRGSKIRDALTSRRQLRRGRRSRNLRYRAPRFLNRKKPKGWLAPSLQHRVDAVMSWMNRLTRLVPVAGFVQELVKFDTQLMQNAAISGVEYQQGELAGYELKEYLLEKFDRKCVYCGKSGVVLNVEHIIPKARGGSNRVSNLAIACAQCNQKKGAMPIEDFLKKKPALLAQIRKQLKTPLRDATAVNATRWALYRNLQATGCTVEVGSGALTKFNRHAFSVPKEHWLDALCAGRIDGVADWENLRPLQAYCIGRGSHKRTRTDKYGFPLCYFSRYKRPNDFGTGDYVRVKVTRGRNTGIWIGRATLTDGKLSVETKAGRVKATFLNSKCLFKSDGYKYQYL

SEQ ID NO: 24679 - protein, 423 aa, unidentified
  source 1..423: note = Thermoplasmata sp.
MSKKVYVQNKDGTPLMPCKPAKARHLLGDDKAEVVQRTPFTIRLKWDCEDNTQKVRVGLDTGSKKAGVSAVREDGEVLYQSKVQLRTDIRSKMDRRRRYRRSRRSRKTRHREPKFDNRRREEGWLPPSLKSKAESMGKAVKKVSEILPVEGVNVEIAPFDMQKVKDPDIEGEEYQNGELKGHTSVRQYVLYRDKHQCINCKKDDVPLQTHHIQPRSEGGTDKPSNMVSLCVECHEKVHSGEIELSERSLKYWTNKEYRFASHVNSMKDRIVDELRRLFDDVKVIFGNMTKAVRKKLGLDKSDVNDSIAVASMDLIDKDFVSKLEYTFVKKCIPKGRYRLHKGERSEVRISADNSDYFGFNRWDKVELLDGTVGFVKGRRKSGYFDISDIHGNSYDHSIKHGKLELISRADTIITEVKGNSSPQ

SEQ ID NO: 24680 - protein, 500 aa, synthetic construct
MTGSYTVKRRKRFPTVVDIPHRMTGNCTRSVKEKNKMPVCVLSANGERLMPTENYGKVRHLLKDGRAVIAKRNPFTIQLTYDTSTYTQPIEMCVGTGYEHIGVSIKTKAKEVVSQQYDLLTNERSRHDDCRAYRRTRRNHLRYRAARFNNRVSSKKPGWIAPSLDNKVERHLDIISRYLSVMPVTDVFIKAATYDTQLLAALEAGEPVPQGKDYQHGPQYGYDTLREAVFERDHYTCVYCKRGLKDGAILHVHHAYYWKGLHGNSMRELATCCEKCNTPANHKEGGKLWGFDKPLRKYTGEAFMNSVRWILYQRAMARFQGVAEVHMTYGVISKRVRTNLGLPYSCATDAYCMGELRPEARCETEVFQKYRRNNRVLSKFYDAKYYDTREKGVIRSGNELSSGRTNRNHNLDGENLRRFRGCKKSKGRTSTRKQRYAMQPGDIVVYGNRKYVSKGCSSYGKALSLLTDGKPLMVSMKKIQLVRHKGGWVRLPHAAAEAKK

SEQ ID NO: 24681 - protein, 443 aa, synthetic construct
MMKVFVLDKDHKPLMPCGPARARKLLKAGRARVHKLQPFTIRIVDRSLADSVVQKVVVKVDPGSKETGIAVVREDEEETHHALYFINLKHRGAAIRDALTSRRQLRRGRRSRNLRYRAPRFLNRSKPKGWLPPSLQHRVDTTLSWVNRLRRLAPVSGIAQELVKFDTQLMQNPDISGVEYQQGELAGYELKEYLLEKFGRRCVYCAKSDVPLNVEHIVPKARGGSNRLSNLAIACVECNQKKGAKPIEEFLKGKPELLARVRKQLKTPLRDVASVNATRWALFHALSATGLPVRTGSGALTKYNRHCFGVPKEHWFDALCVGRINGVSYDSCMKVLNVSCTGRGQYKRTRTDKFGFPICHFMRTKRPHGVGLGDLVRMTVQKGKHPGIWTGRAFPSNDGRVVLILPEFRIWGRARNCSILSLSDGYGYRLTDSETTKPTSFGK

SEQ ID NO: 24682 - protein, 433 aa, synthetic construct
MQSHIRAFVLDKDRKPLMPCHAAKARKLLKKGKAAVFRRFPFTIILKERTREASAIQDVLVKVDPGSKSTGLAVVRKDEKNLHHALAFICLNHRGSKIRDALTSRRQLRRGRRSRNLRYRAPRFLNRKKPKGWLAPSLQHRVDAVMSWMNRLTRLVPVAGFVQELVKFDTQLMQNAAISGVEYQQGELAGYELKEYLLEKFDRKCVYCGKSGVVLNVEHIIPKARGGSNRVSNLAIACAQCNQKKGAMPIEDFLKKKPALLAQIRKQLKTPLRDATAVNATRWALYRNLQATGCTVEVGSGALTKFNRHAFSVPKEHWLDALCAGRIDGVADWENLRPLQAYCIGRGSHKRTRTDKYGFPLCYFSRYKRPNDFGTGDYVRVKVTRGRNTGIWIGRATLTDGKLSVETKAGRVKATFLNSKCLFKSDGYKYQYL

SEQ ID NO: 24683 - protein, 442 aa, Scytonema sp.; identical to SEQ ID NO: 24530

SEQ ID NO: 24684 - protein, 464 aa, synthetic construct
MAVCVLSANGERLMPTENYGKVRHLLKDGRAVIAKRNPFTIQLTYDTSTYTQPIEMCVGTGYEHIGVSIKTKAKEVVSQQYDLLTNERSRHDDCRAYRRTRRNRLRYRAARFNNRVSSKKPGWIAPSLDNKVERHLDIISRYLSVMPVKDVFIKAATYDTQLLAALEAGEPVPQGKDYQHGPQYGHDTLREAVFERDHYTCVYCKRGLKDGAILHVHHAYYWKGLHGNSMRELATCCEKCNTPANHKEGGKLWGFDKPLRKYTGEAFMNSVRWILYQRAMARFQGAAEVHMTYGVISKRVRTDLGLPYSCATDAYCMGELRPEARCDTEVFQKYRRNNRVLSKFYDAKYYDTREKGVIRSGNELSSGRTNRNHNLDGENLRRFRGCKKSKGRTSTRKQRYAMQPGDIVVYGNRKYVSKGCSSYGRALSLLTDGKPLMVSTKKIQLVRHKGGWVRLPQAAVGAKE

SEQ ID NO: 24685 - protein, 433 aa, synthetic construct
MQPHIRAFVLDKDRKPLMPCHAARARKLLKKGKAAVFRRFPFTIILKERTREASAVQDVLVKIDPGSKSTGIAVVRKDKKDVHHALAFICLNHRGSKIRDALTSRRQLRRGRRSRNLRYRAPRFLNRTKPQGSLAPSLRHRVDTVMSWMNRLTRLVPVTGFVQELVKFDTQLMQNAAISGVEYQQGELAGYELKEYLLEKFDRKCVYCGKSGVVLNVEHIIPKARGGSNRVSNLAIACVQCNQKKGAMPIEDFLKKKPALLAQIRKQLKTTLRDAAAVNATRWSLFRSLQSTGCTVEVGSGAQTKFNRHAFSVPKEHWLDALCTGRIDGVADWEKLRPLQAYCIGRGSHKRTRTDKYGFPLCYFSRRKRPNDFGTGDYVRVKVTRGRNAGIWTGRATLTDGKLSVETKAGRVKATFLNSKCLFKSDGYKYQYL

SEQ ID NO: 24686 - protein, 417 aa, synthetic construct
MVYVLDINGHPLMPTERHGKVKHLLKNGKAKVVKRCPFTIQLLYKSLTYTQSIILGVDAGSKHIGLSATTNDKEFYASDVELRTDIVKLISKRRELRRSRRNRKTRYRQARFDNRKRKDGWLAPSISQKIKCHIKVVENVHKILPITNIVVETASFDIQKIKNPNIKDTEYQQGEQLDFWNVREYVLFRDEHICQCCKGKTKDKILNVHHIESRKTGGNAPNNLITLCETCHKGYHNGTVRLPKTIKRGIIFRDAAFMGIMRWAFYNKLREKYKNVSMTYGYITKNTRIENKLPKKHYVDARCISGHPLAKPSEMIYYQKKIRCHNRQLFKINTLKGGTRKRNQSERVIKGYILFDKVKYQGKEYFVFGRRISGFFDIRELNGNKVNKGSINCKKLKLIERCSGYLIELRKETVLLS

SEQ ID NO: 24687 - protein, 443 aa, synthetic construct; identical to SEQ ID NO: 24617

SEQ ID NO: 24688 - protein, 443 aa, Sutterella sp.
MMKVFVLDKDHKPLMPCGPARARKLLKAGRARVHKLQPFTIRIVDRSLADSVVQKVVVKVDPGSKETGIAVVREDEEETHHALYFINLKHRGAAIRDALTSRRQLRRGRRSRNLRYRASRFLNRSKPKGWLPPSLQHRVDTTLSWVNRLRRLAPVSGIAQELVKFDTQRMQNPEISGVEYQQGELAGYELKEYLLEKFGRRCVYCAKSGVPLNVEHIVPKARGGSNRLSNLAIACVECNQKKGARPIEEFLKGKPELLARIRKRLKTPLRDAASVNATRWALFEALRATGLPIRTGSGALTKYNRHCFGVPKEHWFDALCVGRINGVSYDSCMKVLNVSCTGRGQYKRTRTDKFGFPICHFMRTKRPHGVGLGDLVRMTVQKGKHPGIWTGRAFPSNDGSVVLILPEFRIKGRARNCSILSLSDGYGYCLTDSETAKPTSFGK

SEQ ID NO: 24689 - protein, 416 aa, Lactobacillus sp.; identical to SEQ ID NO: 24575

SEQ ID NO: 24690 - protein, 464 aa, synthetic construct; identical to SEQ ID NO: 24525

SEQ ID NO: 24691 - protein, 443 aa, Scytonema sp.; identical to SEQ ID NO: 24526

SEQ ID NO: 24692 - protein, 525 aa, synthetic construct; identical to SEQ ID NO: 24585

SEQ ID NO: 24693 - protein, 453 aa, Lactobacillus sp.; identical to SEQ ID NO: 24603

SEQ ID NO: 24694 - protein, 464 aa, synthetic construct; identical to SEQ ID NO: 24576

SEQ ID NO: 24695 - protein, 453 aa, Lactobacillus sp.
MMSEVQKVNYIYVVDSNGTPLMPTSRLGMVRRWLKTGQASWFGNSRHTIQFVRPVTTNTQELTLGVDAGFHLGLSVVGNKREYYASESLRKSEKDRITSRRELRRSRRNRLRHRQARFDNRRRKDGWLTPSMQHRLDFTIREIKRLYTFLPIANLVVEITPFDNQKLLNSNIKPWEYTHGKMNGFKTIKDYLLARDNYRDTLDGKQYLASQLRVHHLVQRKDGGTNQPDNLVLLSDINHSQANHNNGSLAKLRENRQKALDYRGAYFMNILATRLGDYFDEYTTTQGYLTANLRQEYQIEKSHLNDAFIIAGGTDTTLRTNNVYSRQKLRDNNRVLQKFYDARYIDSRDNKTKTGKELSSGRTRRSRELNYTNLRQFRKTKVKRGRISIRRNHYQLRPYDVVLNTQTNKIETVKSVQNSGTVIKFQTGKTCSIKNVVSLYHVNGMLEKKIENI

SEQ ID NO: 24696 - protein, 432 aa, unidentified
  source 1..432: note = Methylococcaceae sp.
MNRVFVLGSTKKPLMPCHPARARELLRKGKAAVFRMEPFTIILSGREDGEVQDIEFKASPGGKATGITLVGLFRSGARLLFGAEIAHRGAAVRASLDSRRSLRHGRRGRKTRYRQPRPNFAKRSRRANCGGKWLPPSVKSRVDNAAVWSARLAPVACAHVETVRFDTQKLQNPEISGVEYQQGTLAGYEVRGYLLAKWGHACAYCGKQDVPLQIEHIRPIALGGTGRVSNLAIACRPCNEKKAAQPVEQFLADRPDVLKKIKAQAKAPLRDVAALNAARFALGNEIGASGLDTRRWSHGRTKLNRTAQGYAWGKWADAACVGESGAAVYIPANFRPLSIKATGRGTRQVVRTDKYGFPRGAAGRCKRVQGFQTGDLVRLVQPKGKYAGTHVGRLAGVRADGRFDIRADGQKITSGHQNFSLIQRGDGYEYRH

SEQ ID NO: 24697 - protein, 391 aa, Sutterella sp.
TIILKERTREASAIQDVLVKVDPGSKSTGLAVVRKDEKNLHHALAFICLNHRGSKIRDALTSRRQLRRGRRSRNLRYRAPRFLNRKKPKGWLAPSLQHRVDAVMSWMNRLTRLVPVAGFVQELVKFDTQLMQNAAISGVEYQQGELAGYELKEYLLEKFDRKCVYCGKSGVVLNVEHIIPKARGGSNRVSNLAIACTQCNQKKGAMPIEDFLKKKPALLAQIRKQLKTPLRDATAVNATRWALYRNLQATGCTVEVGSGALTKFNRHAFSVPKEHWLDALCAGRIDGVADWENLRPLQAYCIGRGSHKRTRTDKYGFPLCYFSRYKRPNDFGTGDYVRVKVTRGRNTGIWIGRATLTDGKLSVETKAGRVKATFLNSKCLFKSDGYKYQYL

SEQ ID NO: 24698 - protein, 373 aa, synthetic construct
YYASESIRKSEKDRITARREYRRTRRNRLRYRKPRFDNRRRKAGWLAPSVQHRLEFTVREIQRLYRFLPISQLVVEVSPFDNQKLANPNIKPWQYTQGKMHGYQTVKDYLLARDHNRDALDGKAYPASQLRVHHLVQRKDGGTNQPDNLVLLSDVHHNQANHVNGTLAKLAANRQRTIDYRGAYFMSLLANRLNHCFPDYVQTQGYLTANLRVRYGIAKSHLNDAFVIAGGTDQCTRTGNVYRREKLRCNNRSLQKFYDAKYIDRRDGKKKAGKELSSGRTKRSCELNYDNQRIYRLRKVSKGRISIRRQHYRLRPHDIVFNTKTRQIEFVKGVNANGKNVILQSGHNVTPGKLICLYHVNGILTAKVPLVLE

SEQ ID NO: 24699 - protein, 365 aa, synthetic construct
MQRVLVLDKNRQPLMPCHPARARALLKTGKAAVFRRFPFTLILKERDGGAVQDTRLKLDPGSKTTGLALVADFAQRGKVVVWAAELGHRGAAIRKALEQRRAHRRFRRSRLRYRAPRFLNRTKPDGWLAPSLQHRVDTILTWVLRLRRWAPVTALSQELARFDMQQMQNLEISGIEYQQGELQGYEVREYLLEKWGRTCVYCDIEQVPFTIDHIHPKSLGGSDRVSNLTLACFPCNQRKGAQDVRVFLAHDPERLARIERQCKASLKDAAAVNSTRWALWRRLTATGLSVEVGSGGRTKWNRRSPSVSGPRLRSRRTVWTMCLISTRNISRCCKGVTVMRITNQRGALPLQLNASRFSWSTRAEC

SEQ ID NO: 24700 - protein, 453 aa, unidentified; identical to SEQ ID NO: 24539

SEQ ID NO: 24701 - protein, 478 aa, synthetic construct
MTGNCTRSVKGKNKMPVCVLSANGERLMPTENYGKVRHLLKDGRAVIAKRNPFTIQLTYDTSTYTQPIEMCVGTGYEHIGVSIKTKAKEVVSQQYDMLTNERSRHDDCRAYRRTRRNRLRYRVARFNNRVSGKKPGWIAPSLDNKVERHLDIISRYLSVMPVTDVFIKAATYDTQLLAALEAGEPVPQGKDYQHGPQYGYDTLREAVFERDHYTCVYCKRGLKDGAILHVHHAYYWKGLHGNSMRELATCCEKCNTPANHKEGGKLWGFDKPLRKYTGEAFMNSVRWILYQRAMARFQGVAEVHMTYGVISKRVRTNLGLPYSCATDAYCMGELRPEARCETEVFQKYRRNNRVLSKFYDAKYYDTREKGVIRSGNELSSGRTNRNHNLDGENLRRFRGCKKSKGRTSTRKQRYAMQPGDIVVYGNRKYVSKGCSSYGRALSLLTDGKPLMVSMKKIQLVRHKGGWVRLPHAAAEAKK

SEQ ID NO: 24702 - protein, 443 aa, synthetic construct; identical to SEQ ID NO: 24540

SEQ ID NO: 24703 - protein, 478 aa, synthetic construct
MTGNCTRSVKGKNKMPVCVLSANGERLMPTENYGKVRHLLKDGRAVIAKRNPFTIQLTYDTSTYTQPIEMCVGTGYEHIGVSIKTKAKEVVSQQYDMLTNERSRHDDCRAYRRTRRNRLRYRAARFNNRVSGKKPGWIAPSLDNKVERHLDIISRYLSVMPVTDVFIKAATYDTQLLAALEAGEPVPQGKDYQHGPQYGYDTLREAVFERDHYTCVYCKRGLKDGAILHVHHAYYWKGLHGNSMRELATCCEKCNTPANHKEGGKLWGFDKPLRKYTGEAFMNSVRWILYQRAMARFQGVAEVHMTYGVISKRVRTNLGLPYSCATDAYCMGELRPEARCETEAFQKYRRNNRVLSKFYDAKYYDTREKGVIRSGNELSSGRTNRNHNLDGENLRRFRGCKKSKGRTSTRKQRYAMQPGDIVVYGNRKYVSKGCSSYGRALSLLTDGKPLMVSMKKIQLVRHKGGWVRLPHAAAEAKK

SEQ ID NO: 24704 - protein, 452 aa, Lactobacillus sp.; identical to SEQ ID NO: 24535

SEQ ID NO: 24705 - protein, 464 aa, synthetic construct
MPVCVLSANGERLMPTENYGKVRHLLKDGRAVIAKRNPFTIQLTYETSTYTQPIELCVGTGYEHIGVSIKTKAKEVVSQQYDLLTNERSRHDDCRAYRRTRRNRLRYRAARFNNRVSGKKPGWIAPSLDNKVERHLDIISRYLSVMPVTDVFIKAATYDTQLLAALEAGEPVPQGKDYQHGPQYGFDTLREAVFERDHYTCVYCKRGLKDGAILHVHHAYYWKGLHGNSMRELATCCEKCNTPANHKEGGKLWGFDKPLRKYTGEAFMNSVRWILYQRAMARFQGAAEVHMTYGVISKRVRTNLGLPYSCATDAYCMGELRPEARCETEVFQKYRRNNRVLSKFYDAKYYDTREKGVIRSGNELSSGRTNRNHNLDGENLRRFRGCKKSKGRTSTRKQRYAMQPGDIVVYGNHKYVSKGCSSYGKALSLLTDGKPLMVSMKKIQLVRHKGGWVRLPHAAAEAKK

SEQ ID NO: 24706 - protein, 478 aa, synthetic construct; identical to SEQ ID NO: 24531

SEQ ID NO: 24707 - protein, 500 aa, synthetic construct
MTGSYTVKRRKRFPTVVDIPHRMTGNCTRSVKGKNKMPVCVLSANGERLMPTENYGKVRHLLKDGRAVIAKRNPFTIQLTYDTSTYTQPIEMCVGTGYEHIGVSIKTKAKEVVSQQYDLLTNERSRHDDCRAYRRTRRNHLRYRAARFNNRVSSKKPGWIAPSLDNKVERHLDIISRYLSVMPVTDVFIKAATYDTQLLAALEAGEPVPQGKDYQHGPQYGYDTLREAVFERDHYTCVYCKRGLKDGAILHVHHAYYWKGLHGNSMRELATCCEKCNTPANHKEGGKLWGFDKPLRKYTGEAFMNSVRWILYQRAMARFQGVAEVHMTYGVISKRVRTNLGLPYSCATDAYCMGELRPEARCETEVFQKYRRNNRVLSKFYDAKYYDTREKGVIRSGNELSSGRTNRNHNLDGENLRRFRGCKKSKGRTSTRKQRYAMQPGDIVVYGNRKYVSKGCSSYGKALSLLTDGKPLMVSMKKIQLVRHKGGWVRLPHAAAEAKK

SEQ ID NO: 24708 - protein, 443 aa, synthetic construct; identical to SEQ ID NO: 24547

SEQ ID NO: 24709 - protein, 431 aa, Acidithiobacillus sp.; identical to SEQ ID NO: 24542

SEQ ID NO: 24710 - protein, 478 aa, synthetic construct; identical to SEQ ID NO: 24701

SEQ ID NO: 24711 - protein, 416 aa, Lactobacillus sp.; identical to SEQ ID NO: 24575

SEQ ID NO: 24712 - protein, 464 aa, synthetic construct; identical to SEQ ID NO: 24525

SEQ ID NO: 24713 - protein, 493 aa, unidentified
VTHVYVLSKSGKPLMPTRPARARHLPKAGEARVVKVTLFTIQLTIDTPETVQPVYAGQDPGLTQGVAAVSEDGEVLFQAEVKCRPDISEKLAERRNYRRSRRYRKTRYRQPRFANRRRPEGWVAPSIRQLKHEHDKLRRLVESILPVTDWAIELNKFDFQKMENPDIQGVQYQNGPQKGYFDVREYVLERDGYACVLCESNVNRKLYHFRGKSDRPKNLVTFCGECHKKAVDKEIPFEVLLESYRWAAEDGYEYLMALEAQTRIDRDMPRRLLEYTALQHREFKKPVYPVVLNLTGRPQTDTYSFDCLDLTVIAFSYRLINLVDLPGEEVLKHGPVGIIPLVPLMRHQLPDEEVLAECARRIEEAPAEWQPDLYFGLALFSSLRYTREIILKIIEVSKMETSPLFDGIREKWIDQGEQRGLQKGLQQGSREERIKAIMEALEENTGCYPEDLGDRLRAIQDMDILKALFRRAVKAKSLEEFTSALNEIAKLNN

SEQ ID NO: 24714 - protein, 478 aa, synthetic construct; identical to SEQ ID NO: 24701

SEQ ID NO: 24715 - protein, 478 aa, synthetic construct; identical to SEQ ID NO: 24568

SEQ ID NO: 24716 - protein, 417 aa, synthetic construct; identical to SEQ ID NO: 24686

SEQ ID NO: 24717 - protein, 500 aa, synthetic construct
MTGSYTVKRRKRFPTVVDIPHRMTGNCTRSVKGKNKMPVCVLSANGERLMPTENYGKVRHLLKDGRAVIAKRNPFTIQLTYDTSTYTQPIEMCVGTGYEHIGVSIKTKAKEVVSQQYDLLTNERSRHDDCRAYRRTRRNHLRYRAARFNNRVSSKKPGWIAPSLDNKVERHLDIISRYLSVIPVTDVFIKAATYDTQLLAALEAGEPVPQGKDYQHGPQYGYDTLREAVFERDHYTCVYCKRGLKDGAILHVHHAYYWKGLHGNSMRELATCCEKCNTPANHKEGGKLWGFDKPLRKYTGEAFMNSVRWILYQRAMARFQGVAEVHMTYGVISKRVRTNLGLPYSCATDAYCMGELRPEARCETEVFQKYRRNNRVLSKFYDAKYYDTREKGVIRSGNELSSGRTNRNHNLDGENLRRFRGCKKSKGRTSTRKQRYAMQPGDIVVYGNRKYVSKGCSSYGKALSLLTDGKPLMVSMKKIQLVRHKGGWVRLPHAAAEAKK

SEQ ID NO: 24718 - protein, 443 aa, Scytonema sp.; identical to SEQ ID NO: 24526

SEQ ID NO: 24719 - protein, 460 aa, synthetic construct
LARGTLRQRSILWNRLLPDSRKGKDFFMQPHIRAFVLDKDRKPLMPCHAARARKLLKKGKAAVFRRFPFTIILKERTREASAVQDVLVKIAPGSKSTGIAVVRKDKKDVHHALAFICLNHRGSKIRDALTSRRQLRRGRRSRNLRYRAPRFLNRTKPQGSLAPSLRHRVDTVMSWMNRLTRLVPVTGFVQELVKFDTQLMQNAAISGVEYQQGELAGYELKEYLLEKFDRKCVYCGKSGVVLNVEHIIPKARGGPNRVSNLAIACVQCNQKKGAMPIEDFLKKKPALLAQIRKQLKTTLRDAAAVNATRWSLFRSLQSTGCTVEVGSGAQTKFNRHAFSVPKEHWLDALCTGRIDGVADWEKLRPLQAYCIGRGSHKRTRTDKYGFPLCYFSRRKRPNDFGTGDYVRVKVTRGRNAGIWTGRATLTDGKLSVETKAGRVKATFLNSKCLFKSDGYKYQYL

SEQ ID NO: 24720 - protein, 478 aa, synthetic construct; identical to SEQ ID NO: 24701

SEQ ID NO: 24721 - protein, 417 aa, synthetic construct; identical to SEQ ID NO: 24686

SEQ ID NO: 24722 - protein, 464 aa, synthetic construct
MPVCVLSANGERLMPTENYGKVRHLLKDGRAVIAKRNPFTIQLTYETSTYTQPIELCVGTGYEHIGVSIKAKAKEVVSQQYDLLTNERSRHDDCRAYRRTRRNRLRYRAARFNNRVSSKMPGWIAPSLDNKVERHLDIISRYLSVMPVKDVFIKAATYDTQLLAALEAGEPVPQGKDYQHGPQYGYDTLREAVFERDHYTCVYCKRGLKDGAILHVHHAYYWKGLHGNSMRELATCCEKCNTPANHKEGGKLWGFDKSLRKYTGEAFMNSVRWILYQRAMARFQGAAEVHMTYGVISKRVRTNLGLPYSCATDAYCMGELRPEARCETEVFQKYRRNNRVLSKFYDAKYYDTREKGVIRSGNELSSGRTNRNHNLDGENLRRFRGCKKSKGRTSTRKQRYAMQPGDIVVYGNRKYVSKGCSSYGKALSLLTDGKPLMVSMKKIQLVRHKGGWVRLPHAAAEAKK

SEQ ID NO: 24723 - protein, 478 aa, synthetic construct; identical to SEQ ID NO: 24531

SEQ ID NO: 24724 - protein, 443 aa, synthetic construct; identical to SEQ ID NO: 24639

SEQ ID NO: 24725 - protein, 445 aa, unidentified; identical to SEQ ID NO: 24593

SEQ ID NO: 24726 - protein, 470 aa, synthetic construct; identical to SEQ ID NO: 24626

SEQ ID NO: 24727 - protein, 452 aa, unidentified; identical to SEQ ID NO: 24570

SEQ ID NO: 24728 - protein, 477 aa, synthetic construct
MTGSYTRLREEKKMAVCVLSANGERLMPTENYGKVRHLLKDGRAVIAKRNPFTIQLTYETSTYTQPIELCVGTGYEHIGVSIKTKAKEVVSQQYDLLTNERSRHDDCRAYRRTRRNHLRYRAARFNNRVSGKKPGWIAPSLDNKVERHLDIISRYLSVMPVTDVFIKAATYDTQLLAALEAGEPVPQGKDYQHGPQYGFDTLREAVFERDHYTCVYCKRGLKDGAILHVHHAYYWKGLHGNSMRELATCCEKCNTPANHKEGGKLWGFDKPLRKYTGEAFMNSVRWILYQRAMARFQGAAEVHMTYGVISKRVRTDLGLPYSCATDAYCMGELRPEARCETEVFQKYRRNNRVLSKFYDAKYYDTREKGVIRSGNELSSGRTNRNHNLDGENLRRFRGCKKSKGRTSTRKQRYAMQPGDIVVYGNRKYVSKGCSSYGRALSLLTDGKPLVVSMKKIQLVRHKGGWVRLPQAAAGAKE

SEQ ID NO: 24729 - protein, 453 aa, Lactobacillus sp.; identical to SEQ ID NO: 24539

SEQ ID NO: 24730 - protein, 443 aa, synthetic construct; identical to SEQ ID NO: 24617

SEQ ID NO: 24731 - protein, 478 aa, synthetic construct; identical to SEQ ID NO: 24531

SEQ ID NO: 24732 - protein, 478 aa, synthetic construct; identical to SEQ ID NO: 24701

SEQ ID NO: 24733 - protein, 426 aa, Verrucomicrobium sp.; identical to SEQ ID NO: 24574

SEQ ID NO: 24734 - protein, 478 aa, synthetic construct; identical to SEQ ID NO: 24531

SEQ ID NO: 24735 - protein, 478 aa, synthetic construct
MTGNCTRRVKGKNKMPVCVLSANGERLMPTENYGKVRHLLKDGRAVIAKRNPFTIQLTYDTSTYTQPIEMCVGTGYEHIGVSIKTKAKEVVSQQYDMLTNERSRHDDCRAYRRTRRNRLRYRAARFNNRVSGKKPGWIAPSLDNKVERHLDIISRYLSVMPVTDVFIKAATYDTQLLAALEAGEPVPRGKDYQHGPQYGYDTLREAVFERDHYTCVYCKRGLKDGAILHVHHAYYWKGLHGNSMRELATCCEKCNTPANHKEGGKLWGFDKPLRKYTGEAFMNSVRWILYQRAMARFQGVAEVHMTYGVISKRVRTNLGLPYSCATDAYCMGELRPEARCETEVFQKYRRNNRVLSKFYDAKYYDTRENGVIRSGNELSSGRTNRNHNLDGENLRRFRGCKKSKGRTSTRKQRYAMQPGDIVVYGNRKYVSKGCSSYGRALSLLTDGKPLMVSMKKIQLVRHKGGWVRLPHAAAEAKK

SEQ ID NO: 24736 - protein, 386 aa, synthetic construct
MTGNCTRSVKGKNKMPVCVLSANGERLMPTENYGKVRHLLKDGRAVIAKRNPFTIQLTYDTSTYTQPIEMCVGTGYEHIGVSIKTKAKEVVSQQYDMLTNERSRHDDCRAYRRTRRNRLRYRAARFNNRVSGKKPGWIAPSLDNKVERHLDIISRYLSVMPVTDVFIKAATYDTQLLAALEAGEPVPQGKDYQHGPQYGYDTLREAVFERDHYTCVYCKRGLKDGAILHVHHAYYWKGLHGNSMRELATCCEKCNTPANHKEGGKLWGFDKPLRKYTGEAFMNSVRWILYQRAMARFQGVAEVHMTYGVISKRVRTNLGLPYSCATDAYCMGELRPEARCETEVFQKYRRNNRVLSKFYDAKYYDTREKGVIRSGNELSSGRTNRN

SEQ ID NO: 24737 - protein, 436 aa, Bacillus sp.
MFVFVINKHGKALMPCSQRKARILLKTKKAKIIKYQPFTIQLLYGSYGYKQKVKVGIHLGARRLGIAIQSNNHVLAKGEIELRDDIKNNLESRKVYRRNRRNRKCRYRKARFLNRISSKREGWLPPSIRSRSENMFHWIDRFCSLIPDPTLIIQIGKFDFQKIINSHHQNQGDQKGELCSYYNTRYFVFTRDHYTCQVCRKKNKILNTHHIIYRSHGGSNCASNLISVCTDCHTNENHQKGQILWRWMMDKKSPLTYKESPFIHTLRKQIFLKYPNAEFTYGSMTVLKRKRLGLEKSYMNDVLALSDIRKYYEDRSGVFKIKQFRKKKRSLHEATARKGRKAKNITNKRNEKNTKQLKGFFLNDKVRLYNKLGYITGFTGKNSAYVKTIDNEYIIMPNKNYKQVSLSHLERICHNNNWQFTHSPHVNDSGSSVNNK

SEQ ID NO: 24738 - protein, 478 aa, synthetic construct
MTGNCTRSVKGKNKMPVCVLSANGERLMPTENYGKVRHLLKDGRAVIAKRNPFTIQLTYDTSTYTQPIEMCVGTGYEHIGVSIKTKAKEVVSQQYDMLTNERSRHDDCRAYRRTRRNRLRYRAARFNNRVSGKKPGWIAPSLDNKVERHLDIISRYLSVMPVTDVFIKAATYDTQLLAALEAGEPVPQGKDYQHGPQYGYDTLREAVFERDHYTCVYCKRGLKGGAILHVHHAYYWKGLHGNSMRELATCCEKCNTPANHKEGGKLWGFDKPLRKYTGEAFMNSVRWILYQRAMARFQGVAEVHMTYGVISKRVRTNLGLPYSCATDAYCMGELRPEARCETEVFQKYRRNNRVLSKFYDAKYYDTREKGVIRSGNELSSGRTNRNHNLDGENLRRFRGCKKSKGRTSTRKQRYAMQPGDIVVYGNRKYVSKGCSSYGRALSLLTDGKPLMVSMKKIQLVRHKGGWVRLPQAAAGAKE

SEQ ID NO: 24739 - protein, 374 aa, unidentified
  REGION 1..374: note = IscB polypeptide
MMPCSPARARKLLHLKKAKVVKKCPFTIQLSYGSSGYKQEMVGSIVPSSSTIGIAAKSNEKCLYSSEIVVRQDISKKMDGRKTYRNRRRNRKTRYRKARFLNRKSDRRHTPTVNSKIESHIREINRVQKLLPVSKWLVVKASKVEGHFKNGSLDEQWLNLQRQTFERDGFKCRHCKKRGKELHAHHIIHRQDGGEDSIDNLVTLDKDCHVKYHQGKLELKIGEHKFRGKIDTELAILRKNLDLANSENVYGFQAKVKRKLLGLEYSPSNDACAILEVTPQNTFLVKNVPKGDYQRTRGVRSQQKVPKNKIVGFNRYDKIEYENNIYFIKMRMSIGYFKLTDIYNREVPKVIAGRKLKLLGRRKSCLIVNKTFHP

SEQ ID NO: 24740 - protein, 443 aa, synthetic construct
MMKVFVLDKDHKPLMPCGPARARKLLKAGRARVHKLQPFTIRIVDRSLADSVVQKVVVKVDPGSKETGIAVVREDEEETHHALYFINLKHRGAAIRDALTSRRQLRRGRRSRNLRYRAPRFLNRSKPKGWLPPSLQHRVDTTLSWVNRLRRLAPVSGIAQELVKFDTQLMQNPDISGVEYQQGELAGYELKEYLLEKFGRRCVYCAKSDVPLNVEHIVPKARGGSNRLSNLAIACVECNQKKGAKPIEEFLKGKPELLARVRKQLKTPLRDAASVNATRWALFHALSATGLPVRTGSGALTKYNRHCFGVPKEHWFDALCVGRINGVSYEPGMKVLNVSCTGRGQYKRTRTDKFGFPICHFMRTKRPHGVGLGDLVRMTVQKGKHPGIWTGRAFPSNDGSVVLILPEFRIKGRARNCSILSLSDGYGYCLTDSETAKPTSFGK

SEQ ID NO: 24741 - protein, 452 aa, Lactobacillus sp.; identical to SEQ ID NO: 24570

SEQ ID NO: 24742 - protein, 460 aa, synthetic construct
LARGTLRQRSILWNRLLPDSRKGKDFFMQPHIRAFVLDKDRKPLMPCHAARARKLLKKGKAAVFRRFPFTIILKERTREASAVQDVLVKIDPGSKSTGIAVVRKDKKDVHHALAFICLNHRGSKIRDALTSRRQLRRGRRSRNLRYRAPRFLNRTKPQGSLAPSLRHRVDTVMSWMNRLTRLVPVTGFVQELVKFDTQLMQNAAISGVEYQQGELAGYELKEYLLEKFDRKCVYCGKSGVVLNVEHIIPKARGGSNRVSNLAIACVQCNQKKGAMPIEDFLKKKPALLAQIRKQLKTTLRDAAAVNATRWSLFRSLQSTGCTVEVGSGAQTKFNRHAFSVPKEHWLDALCTGRIDGVADWEKLRPLQAYCIGRGSHKRTRTDKYGFPLCYFSRRKRPNDFGTGDYVRVKVTRGRNAGIWTGRATLTDGKLSVETKAGRVKAAFLNSKCLFKSDGYKYQYL

SEQ ID NO: 24743 - protein, 464 aa, synthetic construct; identical to SEQ ID NO: 24525

SEQ ID NO: 24744 - protein, 464 aa, synthetic construct; identical to SEQ ID NO: 24576

SEQ ID NO: 24745 - protein, 478 aa, synthetic construct; identical to SEQ ID NO: 24531

SEQ ID NO: 24746 - protein, 401 aa, Anaerolinea sp.
MKVFVLDNQPVALGIDAGYKTIGYSAVSDKGELIGGAVELFKGQSERLKERAMYRRNRRSRQRYRPPRFNNRVKSKKPGWLAPSIKHKLDTHIKLVKKMKAILPITKVVIGVANFDIQAIKNPDISGVEYQQGEQLGFWNVRKYVLHRDHHQCQNPACQNRAKEKVLEVHHLGYWKQDRSNRPSNLITLCTRCHVAENHQPGGLLYGWQPKLKSFKPETFMSIVRWRLVNTLQCNHTYGFITQNNRIKLGLEKSHHNDAFVIAGGTSQARIPPTNWEILRHHNRGREKFYDAVYIDTRTGEKAKGAELNCGRRKRNRNLNGENLRKYRGQKVRKGRRSIRRQDYALQSGDVVLFEGVKRLVKGVFNYGKWVRLGNPGGKAISASIKKVTPLKKRKGLVIVI

SEQ ID NO: 24747 - protein, 500 aa, synthetic construct
MTGSYTAAPPQTEHHAVDVPHRMTGNCTRSVKGKNKMPVCVLSANGERLMPTENYGKVRHLLKDGRAVIAKRNPFTIQLTYDTSTYTQPIEMCIGTGYEHIGVSIKTKAKEVVSQQYDMLTNERSRHDDCRAYRRTRRNRLRYRAARFNNRVSGKKPGWIAPSLDNKVERHLDIISRYLSVMPVTDVFIKAATYDTQLLAALEAGEPVPQGKDYQHGPQYGYDTLREAVFERDHYTCVYCKRGLKDGAILHVHHAYYWKGLHGNSMRELATCCEKCNTPANHKEGGKLWGFDKPLRKYTGEAFMNSVRWILYQRAMARFQGVAEVHMTYGVISKRVRTNLGLPYSCATDAYCMGELRPEARCETEVFQKYRRNNRVLSKFYDAKYYDTREKGVIRSGNELSSGRTNRNHNLDGENLRRFRGCKKSKGRTSTRKQRYAMQPGDIVVYGNRKYVSKGCSSYGRALSLLTDGKPLMVSMKKIQLVRHKGGWVRLPHAAAEAKK

SEQ ID NO: 24748 - protein, 478 aa, synthetic construct; identical to SEQ ID NO: 24531

SEQ ID NO: 24749 - protein, 464 aa, synthetic construct; identical to SEQ ID NO: 24525

SEQ ID NO: 24750 - protein, 478 aa, synthetic construct; identical to SEQ ID NO: 24531

SEQ ID NO: 24751 - protein, 455 aa, synthetic construct
MTGSYTAAPPQTEHHAVDVPHRMTGNCTRSVKGKNKMPVCVLSANGERLMPTENYGKVRHLLKDGRAVIAKRNPFTIQLTYDTSTYTQPIEMCVGTGYEHIGVSIKTKAKEVVSQQYDMLTNERSRHDDCRAYRRTRRNRLRYRAARFNNRVSGKKPGWIAPSLDNKVERHLDIISRYLSVMPVTDVFIKAATYDTQLLAALEAGEPVPQGKDYQHGPQYGYDTLREAVFERDHYTCVYCKRGLKDGAILHVHHAYYWKGLHGNSMRELATCCEKCNTPANHKEGGKLWGFDKPLRKYTGEAFMNSVRWILYQRAMARFQGVAEVHMTYGVISKRVRTNLGLPYSCATAAYCMGELRPEARCETEVFQKYRRNNRVLSKFYDAKYYDTREKGVIRSGNELSSGRTNRNHNLDGENLRRFRGCKKSKGRTSTRKQRYAMQPGDIVVYGNRKYVSKG

SEQ ID NO: 24752 - protein, 460 aa, synthetic construct; identical to SEQ ID NO: 24549

SEQ ID NO: 24753 - protein, 500 aa, synthetic construct
MTGSYTVKRRKRFPTVVDIPHRMTGNCTRSVKGKNKMPVCVLSANGERLMPTENYGKVRHLLKDGRAVIAKRNPFTIQLTYDTSTYTQPIEMCVGTGYEHIGVSIKTKAKEVVSQQYDLLTNERSRHDDCRAYRRTRRNHLRYRAARFNNRVSSKKPGWIAPSLDNKVERHLDIISRYLSVMPVTDVFIKAATYDTQLLAALEAGEPVPQGKDYQHGPQYGYDTLREAVFERDHYTCVYCKRGLKDGAILHVHHAYYWKGLHGNSMRELATCCEKCNTPANHKEGGKLWGFDKPLRKYTGEAFMNSVRWILYQRAMARFQGVAEVHMTYGVISKRVRTNLGLPYSCATDAYCMGELRPEARCETEVFQKYRRNNRVLSKFYDAKYYDTREKGVIRSGNELSSGRTNRNHNLDGENLRRFRGCKKSKGRTSTRKQRYAMQPGDIVVYGNRKYVSKGCSSYGRALSLLTDGKPLMVSMKKIQLVRHKGGWVRLPHAAAEAKK

SEQ ID NO: 24754 - protein, 443 aa, synthetic construct
MMKVFVLDKDHKPLMPCGPARARKLLKAGRARVHKLQPFTIRIVDRSLADSVVQKVVVKVDPGSKETGIAVVREDEEETHHALYFINLKHRGAAIRDALTSRRQLRRGRRSRNLRYRAPRFLNRSKPKGWLPPSLQHRVDTTLSWVNRLRRLAPVSGIVQELVKFDTQRMQNPEISGVEYQQGELAGYELKEYLLEKFGRRCVYCAKSGVPLNVEHIVPKARGGSNRLSNLAIACVECNQKKGARPIEEFLKGKPELLARIRKRLKTPLRDAASVNATRWALFEALRATGLPIRTGSGALTKFNRHCFGVPKEHWFDALCVGRINGVSYEPGMKVLNVSCTGRGQYKRTRTDKFGFPICHFMRTKRPHGVGLGDLVRMTVQKGKHPGIWTGRAFPSNDGRVVLILPEFRIWGRARNCSILSLSDGYGYRLTDSETTKPTSFGK

SEQ ID NO: 24755 - protein, 443 aa, synthetic construct; identical to SEQ ID NO: 24617

SEQ ID NO: 24756 - protein, 768 aa, unidentified
  source 1..768: note = Ktedonobacteraceae sp.
MSKVFVLDTYEKPLDPVHPGRARILLTQGKASVFRSFPFTLILNTEVKEPVVQPLRIKLDPGSRTTGVAIVNDASGDVVFAAELTHRGHKIKESLQSRRAIRRGRRARKTRYRQPRWHNRRTKKQGWLAPSLESRIANVVTWVHRLSWYCPVSAISMELVRFDMQVMEHAEIAGVEYQQGALQGYEVRQYLLEKWNRQCAYCSKKDIPLEIEHIVPRANGGSDRISNLTLACKPCNKAKGTQDIAVFLKKKPDVLKRIQAQQKAPLNCKRLRNIDRINVAQKPFQLHTSSLYRCSLKGSSVTKAYWFASRPEEVEHQHPFLIFDCQDQLHLPLTIFGKEALVRVSKKTVQGYLYAILPFFGYLETDVWQVRAGRQWDNPPHQIRQAVEDYLVQSLECKVQTHRHGFQLVSITSGTHSTIRIFLSGLKLFYQEMHQRGYYSFSNPLVDAMTTTVAAIEARLAHENDPPRMPEISGVVDARPKNRLSDSYFKLTHEDWVPQIIDDPLLPNLIIEGGKKLSLKSRRLRDECVTWMLFESGARVSEVTGLMLGDWVARGMLREANSFNKGSYGRRTKFLSFSHETVKLLKRYFDSERRRVDPNNYTLDDYLLLAKTKQIDLQTIPLFLSAQRTPLTPKEYREHYWNPACQAAGIEADVHQSRHWHVTCEVRDIYETSKSKEEVHRRLHGLVEYMKWKSKETLEVYEHYFDKQLHDETLEHLHTRMHEAVQDRLEERQQRPPQAKKVQSVGQVGRVSLDEPDLEFLYSLGGEG

SEQ ID NO: 24757 - protein, 435 aa, unidentified
  source 1..435: note = Methylococcaceae sp.
MNRVFVLGSTKKPLMPCHPARARELLRKSKAAVFRMEPFTIILSGREDGEVQDIEFKASPGGKATGIALVGLFRSGARLLFGAEIAHRGAAVRASLDSRRSLRHGRRGRKTRYRQPRPNFAKRSRRANCGGKWLPPSIKSRVDNAAVWSARLARLAPVACAHVETVRFDTQKLQNPEISGIEYQQGTLAGYEVREYLLEKFKRTCAYCGKQGIPLQIEHIQPIALGGTGRVSNLAIACRPCNEKKAAQPVAQFLADRPDVLKKIKAQAKAPLRDVAALNAARFALGNEIGASGLDTRRWSHGRTKLNRTAQGYAWGKWADAACVGESGAAVYIPANFRPLSIKATGRGTRQVVRTDKYGFPRGAAGQCKRVQGFQTGDLVRLVQPKGKYAGTHVGRLAGIRADGRFDIRADGQKITSGHQNFSLIQRGDGYEYRH

SEQ ID NO: 24758 - protein, 478 aa, synthetic construct
MTGNCTRSVKGKNKMPVCVLSANGERLMPTENYGKVRHLLKDGRAVIAKRNPFTIQLTYDTSTYTQPIEMCVGTGYEHIGVSIKTKAKEVVSQQYDMLTNERSRHDDCRAYRRTRRNRLRYRAARFNNRVSGKKPGWIAPSLDNKVERHLDIISRYLSVMPVTDVFIKAATYDTQLLAALEAGEPVPQGKDYQHGPQYGYDTLREAVFERDHYTCVYCKRGLKDGAILHVHHAYYWKGLHGNSMRELATCCEKCNTPANHKEGGKLWGFDKPLRKYTGEAFMNSVRWILYQRAMARFQGVAEVHMTYGVISKRVRTNLGLPYSCATDAYCMGELRPEARCETEVFQKYRRNNRVLSKFYDAKYYDTREKGVIRSGNELSSGRTNRNHNLDGENLRRFRGCKKSKGRTSTRKQRYAMQPGDIVVYGNRKYVSKGCSSYGRALSLLTDGKPLVVSMKKIQLVRHKGGWVRLPQAAAGAKE

SEQ ID NO: 24759 - protein, 455 aa, synthetic construct
MMQKQKQVNYVYVVDANGTPVMPTSRLGMVRRWLKSGQAVWYGNSRTTIQFVRPIDTQTQPLTLGVNTGFHLGMAVVGNDREYYASESIRKSEKDRITARREYRRTRRNRLRYRKPRFNNRRRKAGWLAPSVQHRLEFTVREIQRLYRFLPISQLVVEVSPFDNQKLANPDIKPWEYTQGKMHGYQTVKDYLLARDHNRDALDGQVYPASQLRVHHLVQRKDGGTNQPDNLVLLSDVHHNQANHVNGTLAKLAANRQRTIDYRGAYFMSLLASRLNRYFPDYVQTQGYLTANLRTRYGIVKSHLNDAFVIAGGTDQCTHTGNVYRREKLRCNNRSLQKFYDAKYIDRRDGKKKAGKELSSGRTKRSRELDYDNQRIYRLRKASKGRVSIRRQHYRLRPHDIVFNMKIKQTEFVKSVISNGKSVLLQNGHTVTPRKLVCLHHINGILTVKIPLVLE

SEQ ID NO: 24760 - protein, 433 aa, unidentified
  source 1..433: note = Prevotellaceae sp.
MYIYVQAQDGSPLMPTTRAGKIRHMLRDGRAVIVSYTPFTVRLTYETTRFTQPVSLGVDAGTVHIGLSATTKNKELLSAEIELRTDIVNNLSTRREARRTRRSKRSIRYRESRFNNRRASKKPGWNAPSVEQKVHSHAKSVRDVCRILPITSVTIEVAQFDTQWIKNPGLTGTDYQHGPQLGFWNTREYVLFRDNHECQHCHGKSKDHMLNVHHLESRKTGGNSPDNLITLCETCHKAYHRGEIELKVKRSSKSLRDAAVMSIMRWTVYNQLKDMLAIPVRLTYGYVTKHTRIKNGLEKSYCVDARCISGHPLVIPSEELLHYKQLRRHNRKVMKSNLLPGGRWKRNQAPREIKGFRLFDVVTYNSVPVYVHSRRSTGYFVVKDFEGNTLSNSVSWKSLELKRHSNSYLFNLKKRQGPIPPTDESVGFLGQLS

SEQ ID NO: 24761 - protein, 433 aa, unidentified; identical to SEQ ID NO: 24760
  source 1..433: note = Bacteroidia sp.

SEQ ID NO: 24762 - protein, 509 aa, unidentified
  source 1..509: note = Veillonellaceae sp.
MAMQPQIFLGKINRGMMEMRKVVYVLDKDGMPLMPETCPGHVHFLLKNRIAKPVCSHPFTIQQIHETGKGMFRPLRGAIRVGRTDIGVAVIDEAGEILYAAHVTSRNREIPRLVEERAEHRHASRRGERQRRKRRAKKNGTTTEFSEGHKLPGYEDDVLEFKDIRNTEAKFNNRKESALDPITRQCVQTHCSVVRLVEKILPVTDWTIVCEDSLIQQMKSGCIPSEKRKFRKHGHLKGIKTQIATQQKGRCALCGKPLACAHHILPAKEGGSDCQENLVGLCQSCHAKVHTNRILLVREGDKKKVNGAVVVKKALPYIYDRFCKLFGKEHVFLCSEAAVATFRKIHGIEETCAMDAACAAAIRNHVDCIIPDGVEIFEIRQFRNHNRAIIQAQTERTYKLDGEIVAKNRRPRFSQKGPALSDWFAETEQREGREAALKKLSQLKVKPSQRRYNDLKRPLPGTLFRYQGKIYVLQAQRTKGRYFIPVGYPDMSIPSKDCEIIGFRSLVYI

SEQ ID NO: 24763 - protein, 464 aa, synthetic construct; identical to SEQ ID NO: 24684

SEQ ID NO: 24764 - protein, 459 aa, Acidithiobacillus sp.; identical to SEQ ID NO: 24571

SEQ ID NO: 24765 - protein, 433 aa, synthetic construct
MQPHIRAFVLDKDRKPLMPCHAARARKLLKKGKAAVFRRYPFTIILKERTREASAVQDVLVKIDPGSKSTGIAVVRKDKKDVHHALAFICLNHRGSKIRDALTSRRQLRRGRRSRNLRYRAPRFLNRTKPQGSLAPSLRHRVDTVMSWMNRLTRLVPVTGFVQELVKFDTQLMQNAAISGVEYQQGELAGYELKEYLLEKFDRKCVYCGKSGVVLNVEHIIPKARGGSNRVSNLAIACVQCNQKKGAMPIEDFLKKKPALLAQIRKQLKTTLRDAAAVNATRWSLFRSLQSTGCTVEVGSGAQTKFNRHAFSVPKEHWLDALCTGRIDGVADWEKLRPLQAYCIGRGSHKRTRTDKYGFPLCYFSRRKRPNDFGTGDYVRVKVTRGRNAGIWTGRATLTDGKLSVETKAGRVKATFLNSKCLFKSDGYKYQYL

SEQ ID NO: 24766 - protein, 478 aa, synthetic construct; identical to SEQ ID NO: 24531

SEQ ID NO: 24767 - protein, 478 aa, synthetic construct
MTGNCTRSVKGKNKMPVCVLSANGERLMPTENYGKVRHLLKDGRAVIAKRNPFTIQLTYDTSTYTQPIEMCVGTGYEHIGVSIKTKAKEVVSQQYDMLTNERSRHDDCRAYRRTRRNRLRYRAARFNNRVSGKKPGWIAPSLDNKVERHLDIISRYLSVMPVTDVFIKAATYDTQLLAALEAGEPVPQGKDYQHGPQHGYDTLREAVFERDHYTCVYCKRGLKDGAILHVHHAYYWKGLHGNSMRELATCCEKCNTPANHKEGGKLWGFDKPLRKYTGEAFMNSVRWILYQRAMARFQGVAEVHMTYGVISKRVRTNLGLPYSCATDAYCMGELRPEARCETEVFQKYRRNNRVLSKFYDAKYYDTREKGVIRSGNELSSGRTNRNHNLDGENLRRFRGCKKSKGRTSTRKQRYAMQPGDIVVYGNRKYVSKGCSSYGRALSLLTDGKPLMVSMKKIQLVRHKGGWVRLPHAAAEAKK

SEQ ID NO: 24768 - protein, 478 aa, synthetic construct; identical to SEQ ID NO: 24594

SEQ ID NO: 24769 - protein, 416 aa, Lactobacillus sp.; identical to SEQ ID NO: 24575

SEQ ID NO: 24770 - protein, 464 aa, synthetic construct; identical to SEQ ID NO: 24525

SEQ ID NO: 24771 - protein, 448 aa, Lactobacillus sp.; identical to SEQ ID NO: 24592

SEQ ID NO: 24772 - protein, 493 aa, unidentified; identical to SEQ ID NO: 24713
  source 1..493: note = Desulfofundulus sp.

SEQ ID NO: 24773 - protein, 443 aa, synthetic construct; identical to SEQ ID NO: 24617

SEQ ID NO: 24774 - protein, 443 aa, synthetic construct; identical to SEQ ID NO: 24540

SEQ ID NO: 24775 - protein, 429 aa, unidentified
  source 1..429: note = uncultured archaeon
VKLKLKVVSVINKKGGPLMPCTAAKARRLLKSGKAIVVNKCIFTIKLLWQCTAYKQKVSASQTQSNSIFGTAVKINGTCIFSSSTEVRQDIKNKLERRNDYRKTRRNRKTRYRICRFKNRKSARKNAPSVKSKIDSHSREIKRVEKHFPITSWTTVIASTKIGYTGPVKLEWLNLKRQVHERDNYVCLYCKGKTKDYMLHAHHILARANGGLDTLENLITLCETCHTKYHEGKIILKIGKRKIKTKTKNTQVYMIRKNLKFPEDAIKYGTYGFIIKGNRQDLNLESSPINDACSILKIVPDNSYNIKNVSKGDYQRTKCKAKTKGIGRGPQAKKIKKARGKKTNKIIIPKGKLFGYKKFDLIETSKGIGYIKGRRTTGKFSIVTVQGEVIDSLDIRFNSKRVTARKTTLIQEAQFLPPLKGRVSLRKTR

SEQ ID NO: 24776 - protein, 464 aa, synthetic construct; identical to SEQ ID NO: 24525

SEQ ID NO: 24777 - protein, 433 aa, synthetic construct; identical to SEQ ID NO: 24563

SEQ ID NO: 24778 - protein, 417 aa, synthetic construct; identical to SEQ ID NO: 24686

SEQ ID NO: 24779 - protein, 464 aa, synthetic construct; identical to SEQ ID NO: 24684

SEQ ID NO: 24780 - protein, 470 aa, Scytonema sp.; identical to SEQ ID NO: 24577

SEQ ID NO: 24781 - protein, 443 aa, unidentified; identical to SEQ ID NO: 24642
  source 1..443: note = Scytonema sp.

SEQ ID NO: 24782 - protein, 464 aa, synthetic construct; identical to SEQ ID NO: 24525

SEQ ID NO: 24783 - protein, 478 aa, synthetic construct; identical to SEQ ID NO: 24531

SEQ ID NO: 24784 - protein, 478 aa, synthetic construct; identical to SEQ ID NO: 24701

SEQ ID NO: 24785 - protein, 464 aa, unidentified
  source 1..464: note = Symploca sp.
VLRARNLEQHWRRTPPLPVQLYVVEKMRVCVVNIGERPLMPTTPRKAKILLREGAAKIFKRDPFTIQLLSDCHGYIQPATLGIDAGYLNIGYSALNQTAELIGGEVKMLEGMSERITEKLKYRRTRRRRLRYRAPRFDNRKRNDGWLTPSIQHKLDTHRRLIDRIKSVLPIEAVVIEVANFEIQKIKNPEISGNGYQQGEQNGFDNLREYLLHRDGHKCQHRECKNKSKQPILQVHHLGFWKNPPDRTDRPGNLITLCNKCHTPAQHKKKGKLFGWEPKIKPFKPETFMSTVSWRLAKDTGHKVTFGYITKAKRRALKLDKSHQNDAFVIAGGEHQIRCQALNLVQIRRNKRSMEQFYDAKYLDTRNKKPKSGTELFSGRRTRNKNLNSENLRGYRGHKISKGKRAIKTRRYPYRQGDVVLWNNTIFTVRGVHCKGTRAVLHETGKSVALKQIKSLKKTGGFCA

SEQ ID NO: 24786 - protein, 465 aa, synthetic construct
KMPVCVLSANGERLMPTENYGKVRHLLKDGRAVIAKRNPFTIQLTYDTSTYTQPIEMCVGTGYEHIGVSIKTKAKEVVSQQYDMLTNERSRHDDCRAYRRTRRNRLRYRAARFNNRVSGKKPGWIAPSLDNKVERHLDIISRYLSVMPVTDVFIKAATYDTQLLAALEAGEPVPQGKDYQHGPQYGYDTLREAVFERDHYTCVYCKRGLKDGAILHVHHAYYWKGLHGNSMRELATCCEKCNTPANHKEGGKLWGFDKPLRKYTGEAFMNSVRWILYQRAMARFQGVAEVHMTYGVFSKRVRTNLGLPYSCATDAYCMGELRPEARCETEVFQKYRRNNRVLSKFYDAKYYDTREKGVIRSGNELSSGRTNRNHNLDGENLRRFRGCKKSKGRTSTRKQRYAMQPGDIVVYGNRKYVSKGCSSYGRALSLLTDGKPLMVSMKKIQLVRHKGGWVRLPHAAAEVKK

SEQ ID NO: 24787 - protein, 416 aa, unidentified; identical to SEQ ID NO: 24575

SEQ ID NO: 24788 - protein, 453 aa, unidentified; identical to SEQ ID NO: 24539

SEQ ID NO: 24789 - protein, 353 aa, synthetic construct
MKIAHKIINFRSEVDDTMPVSIEKRPFGVTADGQNVYAYIVRNDRISVELIEYGAAIRSLLVNDDGKWTDVVLGYDTLREAVFERDHYTCVYCKRGLKDGAILHVHHAYYWKGLHGNSMRELATCCEKCNTPANHKEGGKLWGFDKPLRKYTGEAFMNSVRWILYQRAMARFQGVAEVHMTYGVISKRVRTNLGLPYSCATDAYCMGELRPEARCEIEVFQKYRRNNRVLSKFYDAKYYDTREKGVIRSGNELSSGRTNRNHNLDGENLRRFRGCKKSKGRTSTRKQRYAMQPGDIVVYGNRKYVSKGCSSYGRALSLLTDGKPLMVSMKKIQLVRHKGGWGRLPHAAAEAKK

SEQ ID NO: 24790 - protein, 413 aa, unidentified
  source 1..413: note = Bacteroidales sp.
MVYVLDKEGRPIMPTERHGKVRRLLRDGKASVVRLQPFTIRLNYDSDTYKQEVCLGINPGSKHFGVSASSEKKELFSAEVVLRDDIVENISTRRELRRGRRFRKTRYRMPRFKNRGKNEGWLAPSDINRIDMHMKMIRNVHDILPVSKTIIEISNFDIQKIHNPSIKGIEYQQGPQMGFWNVREYVLWRDNHVCRNCFGKSQDPVLEVHHIESPKTGGDAPDNLMTLCKTCHQAYHQGKIDLKGKRGASDRNASAVNKMKQNLIDRATKEFSNVSFTYGYITKNTRISNGIAKSDSSDAFCIAGCISASRLPYLFKCRCVRRHNRSLHVCNPKKGGKRRSNLAPHWIVGTRLQRFDIVKWDGTRCFIFGSSAGRLYLKDIEGSRVSQSATVSAKQVRFLSRKKGSMIMQIVPC

SEQ ID NO: 24791 - protein, 500 aa, synthetic construct; identical to SEQ ID NO: 24543

SEQ ID NO: 24792 - protein, 478 aa, synthetic construct; identical to SEQ ID NO: 24531

SEQ ID NO: 24793 - protein, 464 aa, synthetic construct
MPVCVLSANGERLMPTENYGKVRHLLKDGRAVIAKRNPFTIQLTYETSTYTQPIELCVGTGYEHIGVSIKAKAKEVVSQQYDLLTNERSRHDDCRAYRRTRRNRLRYRAARFNNRVSSKMPGWIAPSLDNKVERHLDIISRYLSVMPVKDVFIKAATYDTQLLAALEAGEPVPQGKDYQHGPQYGYDTLREAVFERDHYTCVYCKRGLKDGAILHVHHAYYWKGLHGNSMRELATCCEKCNTPANHKEGGKLWGFDKPLRKYTGEAFMNSVRWILYQRAMARFQGVAEVHMTYGVISKRVRTNLGLPYSCATDAYCMGELRPEARCETEVFQKYRRNNRVLSKFYDAKYYDTREKGVIRSGNELSSGRTNRNHNLDGENLRRFRGCKKSKGRTSTRKQRYAMQPGDIVVYGNRKYVSKGCSSYGRALSLLTDGKPLMVSMKKIQLVRHKGGWVRLPHAAAEAKK

SEQ ID NO: 24794 - protein, 478 aa, synthetic construct; identical to SEQ ID NO: 24531

SEQ ID NO: 24795 - protein, 417 aa, synthetic construct; identical to SEQ ID NO: 24686

SEQ ID NO: 24796 - protein, 376 aa, synthetic construct
MTGNCTRSVKGKNKMPVCVLSANGERLMPTENYGKVRHLLKDGRAVIAKRNPFTIQLTYDTSTYTQPIEMCVGTGYEHIGVSIKTKAKEVVSQQYDMLTNERSRHDDCRAYRRTRRNRLRYRAARFNNRVSGKKPGWIAPSLDNKVERHLDIISRYLSVMPVTDVFIKAATYDTQLLAALEAGEPVPQGKDYQHGPQYGYDTLREAVFERDHYTCVYCKRGLKDGAILHVHHAYYWKGLHGNSMRELATCCEKCNTPANHKEGGKLWGFDKPLRKYTGEAFMNSVRWILYQRAMARFQGVAEVHMTYGVISKRVRTNLGLPYSCATDAYCMGELRPEYDLPQLCRKKEAAKMPRPRPAEELKDMCQNAAEVLNGGH

SEQ ID NO: 24797 - protein, 443 aa, synthetic construct; identical to SEQ ID NO: 24617

SEQ ID NO: 24798 - protein, 500 aa, synthetic construct; identical to SEQ ID NO: 24707

SEQ ID NO: 24799 - protein, 478 aa, synthetic construct
MTGNCTRSVKGKNKMPVCVLSANGERLMPTENYGKVRHLLKDGRAVIAKRNPFTIQLTYDTSTYTQPIEMCVGTGYEHIGVSIKTKAKEVVSQQYDMLTNERSRHDDCRAWGRTRRKRLRYRAARFNNRVSGKKPGWIAPSLDNKVERHLDIISRYLSVMPVTDVFIKAATYDTQLLAALEAGEPVPQGKDYQHGPQYGYDTLREAVFERDHYTCVYCKRCLKDGAILHVHHAYYWKGLHGNSMRELATCCEKCNTPANHKEGGKLWGFDKPLRKYTGEAFMNSVRWILYQRAMARFQGAVEVHMTYGVISKRVRTDLGLPYSCATDAYCMGELRPEARCETEVFQKYRRNNRVLSKFYDAKYYDTREKGVIRSGNELSSGRTNRNHNLDGENLRRFRGCKKSKGRTSTRKQRYAMQPGDIVVYGNRKYVSKGCSSYGRALSLLTDGKPLMVSTKKIQLVRHKGGWVRLPQAAAGAKE

SEQ ID NO: 24800 - protein, 434 aa, synthetic construct
MQPRIRAFVLDKDRKPLMPCHAARARKLLKKGKAAVFRRFPFTIILKERTRESSAVQDVLVKIDPGSKSTGIAVVRKDEKNVHHALAFICLNHRGSKIRDALTSRRQLRRGRRSRNLRYRAPRCLNRTKPQGWLAPSLRHRVDTVMSWMNRLTRLVPVTGFVQELVKFDTQLIQNAAISGVEYQQGELAGYELKEYLLEKFDRKCVYCGKSGVVLNVEHIIPKARGGSNRVSNLAIACVQCNQKKGAMPIEDFLKKKPALLAQIRKQLKTPLRDAAAVNATRWSLFRNLQATGCTVEVGSGALTKFNRHAFSVPKEHWLDALCAGRIDGVADWENLRPLQAYCIGRGPHKRTRTDKYGFPLCYFSRRKRPNDFGTGDYVRVKVTRGRNAGIWTGRATLSDGYLSVETKAGRVKATFQNGKVLFKNDGYKYQYLS

SEQ ID NO: 24801 - protein, 478 aa, synthetic construct; identical to SEQ ID NO: 24531

SEQ ID NO: 24802 - protein, 416 aa, unidentified; identical to SEQ ID NO: 24575

SEQ ID NO: 24803 - protein, 423 aa, unidentified
  source 1..423: note = Thermoplasmata sp.
MSKKVYVQNKDGTPLMPCKPAKARHLLGDDKAEVVQRTPFTIRLKWDCEDNTQKVRVGLDTGSKKAGVSAVREDGEVLYQSKVQLRTDIRSKMDRRRRYRRSRRSRKTRHREPKFDNRRREEGWLPPSLKSKAESMVKAVKKVSEILPVEGVNVEIAPFDMQKVKDPDIEGEEYQNGELKGHTSVRQYVLYRDKHQCINCKKDDVPLQTHHIQPRSEGGTDKPSNMVSLCVECHEKVHSGEIELSERSLKYWTNKEYRFASHVNSMKDRIVDELRRLFDDVKVIFGNMTKAVRKKLGLDKSDVNDSIAVASMDLIDKDFVSKLEYTFVKKCIPKGRYRLHKGERSEVRISADNSDYFGFNRWDKVELLDGTVGFVKGRRKSGYFDISDIHGNSYDHSIKHGKLELISRADTIITEVKGNSSPQ

SEQ ID NO: 24804 - protein, 478 aa, synthetic construct; identical to SEQ ID NO: 24594

SEQ ID NO: 24805 - protein, 436 aa, Bacillus sp.; identical to SEQ ID NO: 24737

SEQ ID NO: 24806 - protein, 433 aa, Sutterella sp.; identical to SEQ ID NO: 24563

SEQ ID NO: 24807 - protein, 483 aa, unidentified
  source 1..483: note = Chloroflexia sp.
MVLCDRQEANMSGPILVLDAEGTPLMPMAPALARKLTQRGKARFVSHHAFTVLQLPHTVACPALRPITAFITQRPAAAEIILIADGARRSHRLLHIIVDLHTDMVRRLRRRAGHRRRRRARQRYHADRRQGIPFKRRSPAIARSVWRKAHARRQALPHRKPIFSPLIRWRAAALMRVLQALMRLIPISHITLCDAPIAERPAKLARTHAARRTQLEMAYAAEEADHRLRCHYCGTTRGPLQIEHITPQSRGGTDAWQNLVLACAACNQRKGGRTAAEMGHTIQTIRAPAANRTHRTQIHQHLTVRELARQLRPLFPATLRISSSLRVFSDADTDALTARYIAVPVARSRKQTFSSRNYPLSTPMPSRQFVRHKQTIKRRMRVNTALLLPHTASRTRAEVLQAAHAHHGGQQRRVSIGMLCRATRNGEELRGIVSAIHSTGRLTVKLPVWERQGAISWNRTTITSLQSLQILSRERVLFLRDDR

SEQ ID NO: 24808 - protein, 411 aa, Thiomonas sp.
MSVFVLDQHGHPIMPCSEKRARQMLERGRARVHRVMPFTIRLVDRLVEGSALQPLQEKIDPGSKTTGIALVRKDGNAAHAVTLLELEHRADHISKLLYRRRLLRHARRARHGRYRNPRRHYSHRLAPSIRHRLLTTETWVRRLMAWAPVSGLAFEQVAFGLRAGQRDHEPGLSLRERLMSAWGGRCAYCGGPGPFQIDHVRAKAKHGGDHIGNRVLACVSCNKAKGALRLSEFVSGDRREDIKSTLTPARRDEAAVNIARNALGEMLAATGLPVEATNTRHTKMNRRRLGLHKGDALDALVLGQDLGVVTGAGQPVLHIQAMGRGSHQRTRVDAAGFPTSYLMRTKRVHGFATGDLVRARVGRGEMAGVHVGRVAVRANGNFNVVADAGVLRVSWKFCDLLQKGDGYRYGW

SEQ ID NO: 24809 - protein, 478 aa, synthetic construct; identical to SEQ ID NO: 24531

SEQ ID NO: 24810 - protein, 453 aa, unidentified; identical to SEQ ID NO: 24539

SEQ ID NO: 24811 - protein, 460 aa, synthetic construct; identical to SEQ ID NO: 24549

SEQ ID NO: 24812 - protein, 478 aa, synthetic construct
MTGNCTRSVKGKNKMPVCVLSANGERLMPTENYGKVRHLLKDGRAVIAKRNPFTIQLTYDTSTYTQPIEMCVGTGYEHIGVSIKTKAKEVVSQQYDMLTNERSRHDDCRAYRRTRRNRLRHRAARFNNRVSGKKPGWIAPSLDNKVERHLDIISRYLSVMPVTDVFIKAATYDTQLLAALEAGEPVPQGKDYQHGPQYGYDTLREAVFERDHYTCVYCKRGLKDGAILHVHHAYYWKGLHGNSMRELATCCEKCNTPANHKDGGKLWGFDKPLRKYTGEAFMNSVRWILYQRAMARFQGVAEVHMTYGVISKRVRTNLGLPYSCATDAYCMGELRPEARCETEVFQKYRRNNRVLSKFYDAKYYDTREKGVIRSGNELSSGRTNRNHNLDGENLRRFRGCKKSKGRTSTRKQRYAMQPGDIVVYGNRKYVSKGCSSYGRALSLLTDGKPLMVSMKKIQLVRHKGGWVRLPHAAAEAKK

SEQ ID NO: 24813 - protein, 464 aa, synthetic construct
MPVCVLSANGERLMPTENYGKVRHLLKDGRAVIAKRNPFTIQLTYETSTYTQPIELCVGTGYEHIGVSIKTKAKEVVSQQYDLLTNERSRHDDCRAYRRTRRNRLRYRAARFNNRVSGKKPGWIAPSLDNKVERHLDIISRYLSVMPVTDVFIKAATYDTQLLAALEAGEPVPQGKDYQHGPQYGFDTLREAVFERDHYTCVYCKRGLKDGAILHVHHAYYWKGLHGNSMRELATCCEKCNTPANHKEGGKLWGFDKPLRKYTGEAFMNSVRWILYQRATARFQGAAEVHMTYGVISKRVRTNLGLPYSCATDAYCMGELRPEARCETEVFQKYRRNNRVLSKFYDAKYYDTREKGVIRSGNELSSGRTNRNHNLDGENLRRFRGCKKSKGRTSTRKQRYAMQPGDIVVYGNRKYASKGCSSYGRALSLLTDGKPLVVSMKKIQLVRHKGGWVRLPQAAAGAKE

SEQ ID NO: 24814 - protein, 501 aa, synthetic construct; identical to SEQ ID NO: 24556

SEQ ID NO: 24815 - protein, 435 aa, unidentified; identical to SEQ ID NO: 24572
  source 1..435: note = Methylococcaceae sp.

SEQ ID NO: 24816 - protein, 464 aa, synthetic construct; identical to SEQ ID NO: 24601

SEQ ID NO: 24817 - protein, 433 aa, synthetic construct; identical to SEQ ID NO: 24682

SEQ ID NO: 24818 - protein, 478 aa, synthetic construct
MTGNCTRSVKGKNKMPVCVLSANGERLMPTENYGKVRHLLKDGRAVIAKRNPFTIQLTYDTSTYTQPIEMCVGTGYEHIGVSIKTKAKEVVSQQYDMLTNERSRHDDCRAYRRTRRNRLRYRAARFNNRVSGKKPGWIAPSLDNKVERHLDIISRYLSVMPVTDVFIKAATYDTQLLAALEAGEPVPQGKDYQHGPQYGYDTLREAVFERDHYTCVYCKRGLKDGAILHVHHAYYWKGLHGNSMRELATCCEKCNTPANHKEGGKLWGFDKPLRKYTGEAFMNSVRWILYQRAMARFQGVAEVHMTYGVISKRVRTNLGLPYSCATDAYCMGELRPEARCETEVFQKCRRNNRVLSKFYDAKYYDTREKGVIRSGNELSSGRTNRNHNLDGENLRRFRGCKKSKGRTSTRKQRYALQPGDIVVYGNRKYVSKGCSSYGRALSLLTDGKPLVVSMKKIQLVRHKGGWVRLPQAAAEAKK

SEQ ID NO: 24819 - protein, 430 aa, Streptomyces sp.
  VARIANT 430: note = X can be any naturally occurring amino acid
VFVLDKHGTPLQPTTPARARKLLASGRAVVARHTPFVIRLKDRTANHSQVDGVEIGIDPGSKHTGIAVFTTVTGERRGRYSIQLDHRGAAIRKKLERRAAYRRGRRTRNLRYRAPRFLNRTRPKGWLPPSLRHRVDTTTSWVDRLARWAPVKAVHVERVAFDTNAISAGRPLEGAEYQHGTLHGTEVREYLLAKFGRACVYCGAMGVPLNIDHIRPRSRGGSDRVANLTLACIPCNQAKSSRPVEEFAPKRAAEILKRAKAPLRDAAAVNATTWALWRPWTHACPPAPRPAGAPSGTAPGAPCPTPTPWTPSPSANSTPSPPGPAPSWSSGRPDAASTSAPAPTSTASPAYACPASSSSSATPPATSSGPSSPRGRTRAPTPAASPSAPPGTSPSEPQAASTPPGTSTSASSSEPTATPTPANPKEPRLX

SEQ ID NO: 24820 - protein, 454 aa, Lactobacillus sp.; identical to SEQ ID NO: 24536

SEQ ID NO: 24821 - protein, 452 aa, Lactobacillus sp.; identical to SEQ ID NO: 24570

SEQ ID NO: 24822 - protein, 478 aa, synthetic construct; identical to SEQ ID NO: 24531

SEQ ID NO: 24823 - protein, 442 aa, unidentified
  source 1..442: note = Symploca sp.
MKVCVVNIGERPLMPTTPRKAKILLREGAAKIFRRDPFTIQLLSDCHGYIQPATLGIDAGYLNIGYSALNQTAELIGGEVKMLEGMSQRISEKLKYRRTRRNRLRYRAPRFNNRRRNNGWLTPSIEHKLDTHHRLIDRIKSVLPIETVVIEVANFDIQKIKNPEISGNGYQQGEQNGFDNLREYLLHRDGHKCQHPECKNKSKQPNLQVHHLGFWKNPPDRTDRPGNLITLCNKCHTPAQHKKKGKLFGWEPKIKPFKPETFMSTVRWRLAKDTGYKATFGYITKAKRRILKLDKSHHNDAFVIAGGEYQTRCEALNLVQIRGNKRSMEQFYDAKYLDIRDKVPKSGTELFSGRRTRNNNLNSENLRVYRGHKLSKGQRRVKKLRYRYQPHDEVEFEGAVFEVVGMQNKGTGVKLKDYPGIKNKVVKISAVKSVKKRGGICA

SEQ ID NO: 24824 - protein, 464 aa, synthetic construct
MPVCVLSANGERLMPTENYGKVRHLLKDGRAVIAKRNPFTIQLTYETSTYTQPIELCVGTGYEHIGVSIKAKAKEVVSQQYDLLTNERSRHDDCRAYRRTRRNRLRYRAARFNNRVSSKMPGWIAPSLDNKVERHLDIISRYLSVMPVKDVFIKAATYDTQLLAALEAGEPVPQGKDYQHGPQYGYDTLREAVFERDHYTCVYCKRGLKDGAILHVHHAYYWKGLHGNSMRELATCCEKCNTPANHKEGGKLWGFDKPLRKYTGEAFMNSVRWILYQRAMARFQGVAEVHMTYGVISKRVRTNLGLPYSCATDAYCMGELRPEARCETEVFQKYRRNNRVLSKFYDAKYYDTREKGVIRSGNELSSGRTNRNHNLDGENLRRFRGCKKSKGRTSTRKQRYAMQPGDIVVYGNHKYVSKGCSSYGRALSLLTDGKPLMVSMKKIQLVRHKGGWVRLPHAAAEAKK

SEQ ID NO: 24825 - protein, 433 aa, synthetic construct
MQSHIRAFVLDKDRKPLMPCHAAKARKLLKKGKAAVFRRFPFTIILKERTREASAIQDVLVKVDPGSKSTGLAVVRKDEKNVHHALAFICLNHRGSKIRDALTSRRQLRRGRRSRNLRYRAPRFLNRKKPKGWLAPSLQHRVDAVMSWMNRLTRLVPVAGFVQELVKFDTQLMQNAAISGVEYQQGELAGYELKEYLLEKFDRKCVYCGKSGVVLNVEHIIPKARGGSNRVSNLAIACAQCNQKKGAMPIEDFLKKKPALLAQIRKQLKTPLRDAAAVNATRWALYRNLQATGCTVEIGSGALTKFNRHAFSVPKEHWLDALCAGRIDGVADWENLRPLQAYCIGRGSHKRTRTDKYGFPLCYFSRYKRPNDFGTGDYVRVKVTRGRNTGIWIGRATLTDGKLSVETKAGRVKATFLNSKCLFKSDGYKYQYL

SEQ ID NO: 24826 - protein, 464 aa, synthetic construct; identical to SEQ ID NO: 24705

SEQ ID NO: 24827 - protein, 416 aa, unidentified
  REGION 1..416: note = IscB polypeptide
VVLGPKGSKTKEILKLVYVVNKNGNPLMPCKEAKARHLLKSGKARVLLRCPFTICLNWECEEGVQEVVASLITSSSEVGVAVKRDSGECLYAAEIELRQNVTRATVQIVKGKKKKVSRRMQYRRPRRNRKTRYRQCRNRNRTGNYRQKYSPTLRSKIEGHEREVRRVEKLLPVTRWLVVRGAKVEGHFKDGSLEEQWLNVQRQVFERDGFRCRHCKKGKRELHAHHLEARKDGGLDTLENLVTLCKECHGDYHRGLISLKIGKHTYKGKVDTEVAIIRKNLVVEKSEDVYGFQVKAKRNALELSYSPLNDACAALNVKPSTNVYGIRCIPRGDYQRTRGRHSQQVVPKGKIMGFNRFDKVRYLGKALFIKMRMSTGYFKLTDINNKDIPKVILGRKLKLLGRRRSCLIALTTPTSP

SEQ ID NO: 24828 - protein, 464 aa, synthetic construct; identical to SEQ ID NO: 24525

SEQ ID NO: 24829 - protein, 439 aa, unidentified
  source 1..439: note = Symploca sp.
MRICVVNIGERPLMPTTPRKAKILLREGAAKIFKRDPFTIQLLSDCHGYIQSATLGIDAGYLNIGYSAINQTAELIGGEVKMLKGVSQRITEKLKYRRTRRNRLRHRAPRFDNRRRSNNWLTPSIQHKLDTHHRLIDRIKSVLPIDQVVIEVANFDIQKIKNPEISGSGYQQGEQNGFDNLREYLLHRDGHKCQHRECKNKSKQPILQVHHLGFWKNPPDRTDRPGNLITLCNLCHTPAQHKKKGKLFGWEPKIKPFKPETFMSTVRWKLTKDTCYKATFGYITKAKRRILKLGKSHHNDAFVIAGGEYQTRCEALNLVQIRRNKRSMEQFYDAKYLDTRDKKPKSGTELFSGRRTRNKNLNSENLRAHRGHKVSKGKRAIKTKRYPYRQGDIVLWNGKVFTVRGVHCKGTRAILHETGKSVALRQIESLKKTGGLCAI

SEQ ID NO: 24830 - protein, 477 aa, synthetic construct; identical to SEQ ID NO: 24573

SEQ ID NO: 24831 - protein, 478 aa, synthetic construct; identical to SEQ ID NO: 24531

SEQ ID NO: 24832 - protein, 478 aa, synthetic construct; identical to SEQ ID NO: 24531

SEQ ID NO: 24833 - protein, 470 aa, Microcoleus sp.
VKTLAKETTFLGMKTCLLGLTIMKVYVINRKGRPLMPTTPRKARLLLKSGKAKIVRRTPFSIQLIYGSSGYTQPVNLGIDAGYENIGFSAVNENRELIGGELKMLKGISERITERRKYRRTRRNRLRHRKPRFSNRRIEKGWLAPSIQHKLDTHHRLIQKICRTLPVRTVTIEVAALDIQKIKNPTIVGEQYQYGEQYGFDNLREYILHRDGHKCQNPNCNNKTDKPILQVHHLGFWKNPPDRTDRPANLITLCTKCHTPKNHQKKGFLFGWQPKLKSFKGETFMTMVRWRLTEQGRYESTFGYITKGKRRELEIEKSHHNDAFVIAGGTTQTRVVKPLMLEQIRRNKRSLEQFYDAKYRDIRDGEIRSGGELSSGRRTRNTNLNGENLRQHRAHKVSTGRRAIKRKRYPYKQRDLVLFEGKAYEVIGMQNLGTRLSLKPDTNSKTKYKTAALSKVKPLKRRGGICEQQT

SEQ ID NO: 24834 - protein, 478 aa, synthetic construct; identical to SEQ ID NO: 24659

SEQ ID NO: 24835 - protein, 470 aa, synthetic construct
VKGKNKMPVCVLSANGERLMPTENYGKVRHLLKDGRAVIAKRNPFTIQLTYDTSTYTQPIELCVGTGYEHIGVSIKTKAKEVVSQQYDLLTNERSRHDDCRAYRRTRRNHLRYRAARFNNRVSGKKPGWIAPSLDNKVERHLDIISRYLSVMPVTDVFIKAATYDTQLLAALEAGEPVPQGKDYQHGPQYGYDTLREAVFERDHYTCVYCKRGLKDGAILHVHHAYYWKGLHGNSMRELATCCEKCNTPANHKEGGKLWGFDKPLRKYTGEAFMNSVRWILYQRAMARFQGAAEVHMTYGVISKRVRTDLGLPYSCATDAYCMGELRPEARCETEAFQKYRRNNRVLSKFYDAKYYDTREKGVIRSGNELSSGRTNRNHNLDGENLRRFRGCKKSKGRTSTRKQRYAMQPGDIVVYGNRKYVSKGCSSYGRALSLLTDGKPLMVSMKKIQLVRHKGGWVRLPQAAAEAKK

SEQ ID NO: 24836 - protein, 478 aa, synthetic construct; identical to SEQ ID NO: 24701

SEQ ID NO: 24837 - protein, 478 aa, synthetic construct
MTGNCTRSVKGKNKMPVCVLSANGERLMPTENYGKVRHLLKDGRAVIAKRNPFTIQLTYDTSTYTQPIEMCVGTGYEHIGVSIKTKAKEVVSQQYDMLTNERSRHDDCRAYRRTRRNRLRYRAARFNNRVSGKKPGWIAPSLDNKVERHLDIISRYLSVMPVTDVFIKAATYDTQLLAALEAGEPVPQGKDYQHGPQYGYDTLREAVFERDHYTCVYCKRGLKDGAILHVHHAYYWKGLHGNSMRELATCCEKCNTPANHKEGGKLWGFDKPLRKYTGEAFMNSVRWILYQRAMARFQGVAEVHMTYGVISKRVRTNLGLPYSCATDAYCMGELRPEARCETEVFQKYRRNNRVLSKFYDAKYYDTREKGVIRSGNELSSGRTNRNHNLDGKNLRRFRGCKKSKGRTSTRKQRYAMQPGDIVVYGNRKYVSKGCSSYGRALSLLTDGKPLMVSMKKIQLVRHKGGWVRLPHAAAEAKK

SEQ ID NO: 24838 - protein, 464 aa, synthetic construct; identical to SEQ ID NO: 24824

SEQ ID NO: 24839 - protein, 478 aa, synthetic construct; identical to SEQ ID NO: 24531

SEQ ID NO: 24840 - protein, 478 aa, synthetic construct; identical to SEQ ID NO: 24531

SEQ ID NO: 24841 - protein, 425 aa, unidentified
  source 1..425: note = Thermoplasmata sp.
MTDKVYVQDKDGQPLMPTKPARARRKLDQGKAEVVQRDPFTIRLTYEVDGEKNTEEIRIGLDEGSKKGGASAVQNGGEVLYQSEVQLRTDIRSKMDRRRRYRRSRRSRKTRYRKPKFDNRRREEGWLPPSLKSKAESMVKAVKDISEILPIEGVNVEIAPFDMQKVKDPDIEGEEYQNGELKGHTSARQYVLYRDKHQCINCKKDDVPLQTHHIQPKREGGTDKPSNMVSLCVECHEGVHSGEVELSERSLKYWTNKEYKYASHVNSMKDYIVDELKKLFDDVKVTFGNITKAVRKKLGLGKSDVNDSIAVASQDFIDKDSVSTLGYTFVKKCLPRGRYRLHKGEGSEVSIPTDDSDYFGFNRWDKVELPDGTVGFVKGRRKSGYFDISDIDGNSYDHSIRYSKLELISRADTIITEVRGNSSPQ

SEQ ID NO: 24842 - protein, 478 aa, synthetic construct
MTGNCTRSVKGKNKMPVCVLSANGERLMPTENYGKVRHLLKDGRAVIAKRNPFTIQLTYDTSTYTQPIEMFVGTGYEHIGVSIKTKAKEVVSQQYDMLTNERSRHDDCRAYRRTRRNRLRYRAARFNNRVSGKKPGWIAPSLDNKVERHLDIISRYLSVMPVTDVFIKAATYDTQLLAALEAGEPVPQGKDYQHGPQYGYDTLREAVFERDHYTCVYCKRGLKDGAILHVHHAYYWKGLHGNSMRELATCCEKCNTPANHKEGGKLWGFDKPLRKYTGEAFMNSVRWILYQRAMARFQGVAEVHMTYGVISKRVRTNLGLPYSCATDAYCMGELRPEARCETEVFQKYRRNNRVLSKFYDAKYYDTREKGVIRSGNELSSGRTNRNHNLDGENLRRFRGCKKSKGRTSTRKQRYAMQPGDIVVYGNRKYVSKGCSSYGRALSLLTDGKPLMVSMKKIQLVRHKGGWVRLPHAAAEAKK

SEQ ID NO: 24843 - protein, 422 aa, synthetic construct
MVYVIDIQGRPLMPTERHRKVRRLLRDGLARVVTRTPFTIQLLYETTPFVQPVTLGLDPGSKVAGLSASTKDRELIRVEASLRTDIVGLLSTRRELRRTRRSRMLRHRKARFDNRKKPDNLMAPSIEQRIDSHMKLVNKACSILPVSRIIVETAQFDMQLIKNPDISGTDYQHGEQEGWKNVREYVLWRDGHSCRSCGGKSKDFVLEVHHLESRKTGGNSPDNLVTLCKACHEGYHRGDIQLKLKHAPSLRDAVAVNIFRWEIYNRLVKAYGKDKVGLIYGYKTKDRRISLSLPKTSETDAFCIAGNLDASRCDLIKAKFVARHCRSLHRQVTEKGGKRRGTVTSHWIGKSYLQRFDTVKYQGKECIISGSTNGRPILRNIDWTKATDSPSVNPKQVKFLSRKHDSIIYKTFTNKQIITCET

SEQ ID NO: 24844 - protein, 417 aa, synthetic construct; identical to SEQ ID NO: 24686

SEQ ID NO: 24845 - protein, 417 aa, synthetic construct; identical to SEQ ID NO: 24686

SEQ ID NO: 24846 - protein, 478 aa, synthetic construct
MTGNCTRSVKGKNKMPVCVLSANGERLMPTENYGKVRHLLKDGRAVIAKRNPFTIQLTYDTSTYTQPIEMCVGTGYEHIGVSIKTKAKEVVSQQYDMLTNERSRHDDCRAYRRTRRNRLRYRAARFNNRVSGKKPGWIAPSLDNKVERHLDIISRYLSVMPVTDVFIKAATYDTQLLAALEAGEPVPQGKDYQHGPQYGYDTLREAVFERDHYTCVYCKRGLKDGAILHVHHAYYWKGLHGNSMRELATCCEKCNTPANHKEGGKLWGFDKPLRKYTGEAFMNSVRWILYQRAMARFQGVAEVHMTYGVFSKRVRTNLGLPYSCATDAYCMGELRPEARCETEVFQKYRRNNRVLSKFYDAKYYDTREKGVIRSGNELSSGRTNRNHNLDGENLRRFRGCKKSKGRTSTRKQRYAMQPGDIVVYGNRKYVSKGCSSYGRALSLLTDGKPLMVSMKKIQLVRHKGGWVRLPHAAAEVKK

SEQ ID NO: 24847 - protein, 478 aa, synthetic construct
MTGNCTRSVKGKNKMPVCVLSANGERLMPTENYGKVRHLLKDGRAVIAKRNPFTIQLTYDTSTYTQPIEMCVGTGYEHIGVSIKTKAKEVVSQQYDMLTNERSRHDDCRAYRRTRRNRLRYRAARFNNRVSGKKPGWIAPSLDNKVERHLDIISRYLSVMPVTDVFIKAATYDTQLLAALEAGEPVPQGKDYQHGPQYGYDTLREAVFERDHYTCVYCKRGLKDGAILHVHHAYYWKGLHGNSMRELATCCEKCNTPANHKEGGKLWGFDKPLRKYTGEAFMNSVRWILYQRAMARFQGVAEVHMTYGVISKRVRTNLGLPYSCATDAYCMGELRPEARCETEVFQKYRRNNRVLSKFYDAKYYDTREKGVIRSGNELSSGRTNRNHNLDGENLRRFRGCKKSKGRTSTRKQRYAMQPGDIVVYGNRKYVSKGCSSYGRALSLLTDGKPLMVSMKKIQLVRHKGGWVRLTHAAAEAKK

SEQ ID NO: 24848 - protein, 478 aa, synthetic construct; identical to SEQ ID NO: 24701

SEQ ID NO: 24849 - protein, 443 aa, Sutterella sp.; identical to SEQ ID NO: 24617

SEQ ID NO: 24850 - protein, 478 aa, synthetic construct; identical to SEQ ID NO: 24701

SEQ ID NO: 24851 - protein, 443 aa, Scytonema sp.; identical to SEQ ID NO: 24526

SEQ ID NO: 24852 - protein, 417 aa, synthetic construct; identical to SEQ ID NO: 24686

SEQ ID NO: 24853 - protein, 443 aa, synthetic construct; identical to SEQ ID NO: 24617

SEQ ID NO: 24854 - protein, 433 aa, synthetic construct
MQPHIRAFVLDKDRKPLMPCHAARARKLLKKGKAAVFRRFPFTIILKERTREASAVQDVLVKIDPGSKSTGIAVVRKDKKDVHHALAFICLNHRGSKIRDALTSRRQLRRGRWSRNLRYRAPRFLNRTKPQGSLAPSLRHRVDTVMSWMNRLTRLVPVTGFVQELVKFDTQLMQNAAISGVEYQQGELAGYELKEYLLEKFDRKCVYCGKSGVVLNVEHIIPKARGGSNRVSNLAIACVQCNQKKGAMPIEDFLKKKPALLAQIRKQLKTTLRDAAAVNATRWSLFRSLQSTGCTVEVGSGAQTKFNRHAFSVPKEHWLDALCTGRIDGVADWEKLRPLQAYCIGRGSHKRTRTDKYGFPLCYFSRRKRPNDFGTGDYVRVKVTRGRNAGIWTGRATLTDGKLSVETKAGRVKATFLNSKCLFKSDGYKYQYL

SEQ ID NO: 24855 - protein, 452 aa, Lactobacillus sp.; identical to SEQ ID NO: 24570

SEQ ID NO: 24856 - protein, 478 aa, synthetic construct; identical to SEQ ID NO: 24591

SEQ ID NO: 24857 - protein, 455 aa, synthetic construct
VEPCDQAAQIGLDALFVCTPHSNDDGHRKGQNQDCVSVRKGCHHMSVFVLDQHGHPIMPCSEKRARQMLERGRARVHRVMPFTIRLVDRLVEGSALQPLQEKIDPGSKTTGIALVRKDGNAAHAVTLLELEHRADHISKLLYRRRLLRHARRARHGRYRNPRRHYSHRLAPSIRHRLLTTETWVRRLMAWAPVSGLAFEQVAFGLRAGQRDHEPGLSLRERLMSAWGGRCAYCGGPGPFQIDHVRAKAKHGGDHIGNRVLACVSCNKAKGALRLSEFVSGDRREDIKSTLTPARRDEAAVNIARNALGEMLAATGLPVEATNTRHTKMNRRRLGLHKGDALDALVLGQDLGVVTGAGQPVLHIQAMGRGSHQRTRVDAAGFPTSYLMRTKRVHGFATGDLVRARVGRGEMAGVHVGRVAVRANGNFNVVADAGVLRVSWKFCDLLQKGDGYRYGW

SEQ ID NO: 24858 - protein, 478 aa, synthetic construct; identical to SEQ ID NO: 24701

SEQ ID NO: 24859 - protein, 464 aa, synthetic construct
MMPTQKQKQVNYVYVVDANGTPVMPTSRLGMVRRWLKSGQAVWYGNSRTTIQFVRPIDTQTQPLTLGVNTGFHLGMAVVGNDREYYASESIRKSEKDRITARREYRRTRRNRLRYRKPRFDNRRRKAGWLAPSVQHRLEFTVREIQRLYRFLPISQLVVEVSPFDNQKLANPAIKPWEYTQGKMHGYQTVKDYLLVRDHNRDALDGQVYPASQLRVHHLVQHKDGGTNQPDNLVLLSDVHHNQANHVNGTLTKLAANRQRTIDYRGVYFMSLLASRLNHYFPNYVQTQGYLTANLRFRYGITKSHLNDAFVIAGGTDQYTRTGNVYRREKLRCNNRSLQKFYDAKYIDRRDDKKKAGKELSSGRTKRSRELNYDNQRIYRLRKVSKGRISIRRQHYRLRPHDIVFNMKIKQTEFVKGVISNGKSVLLQNGHTVTPQKLVCLHHVNGILTVKVPLVLDDGLISHD

SEQ ID NO: 24860 - protein, 453 aa, Janthinobacterium sp.
MGIFVLDKKSRPLMPCSEKRARKLLDCRRARVHLLFPFSIGLVDRLLEDGVLQPLRLSDDPGSVTSGLAVCRIEEGDVNDMSDAAGINAPVMHILCLMELVHRGPAIKKSLHARSSMRRRRRGNLRYRAPRFNNRTRRKVWLAPSLQRRIDTTMSWAARRRRLAPITHLAQERVHFDMRKMENPEICGVRYQQGTLLGYEMREYLLDKFNRSCADCDATGVPLQMAHIDAEADGGSNRVSDLTLACDPCNKNARDIREFQKKDPVRLAKILAKAKAPLRDAAAVNATRWTRFEALKKTGLPAETGGGHTNWSRSRLGLPKTRAHNAACVGIVGGIGGTRAPTLRVKCTGCGSRCKTRLNQYGFRRADLPSGKGIHKGRVALRMTGNFNIQTGIAHALTVRGFSQKHCSVIQRADGYGYVWQKAIQLSNLRAPSASRSAPALPAVNAGVSRSNI

SEQ ID NO: 24861 - protein, 464 aa, synthetic construct; identical to SEQ ID NO: 24525

SEQ ID NO: 24862 - protein, 443 aa, synthetic construct
MMKVFVLDKDHKPLMPCGPARARKLLKAGRARVHKLQPFTIRIVDRSLADSVVQKVVVKVDPGSKETGIAVVREDEEETHHALYFINLKHRGAAIRDALTSRRQLRRGRRSRNLRYRAPRFLNRSKPKGWLPPSLQHRVDTTLSWVNRLRRLAPVSGIAQELVKFDTQRMQNPEISGVEYQQGELAGYELKEYLLEKFGRRCVYCAKSDVPLNVEHIVPKARGGSNRLSNLAIACVECNQKKGAKPIEEFLKGKPELLARVRKQLKTPLRDAASVNATRWALFHALSATGLPVRTGSGALTKYNRHCFGVPKEHWFDALCVGRINGVSYDSCMKVLNVSCTGRGQYKRTRTDKFGFPICHFMRTKRPHGVGLGDLVRMTVQKGKHPGIWTGRAFPSNDGRVVLILPEFRIWGRARNCSILSLSDGYGYRLTDSETTKPTSFGK

SEQ ID NO: 24863 - protein, 392 aa, Alicyclobacillus sp.
MKQNRVLVLDTNRRPLMPCHPARARQLLKAGRASVFRRYPFTIILHDRDGGDIQPTQLKLAPGSKTTGVALVADFQRGKTVVWAAEIQHRGDQIRQALLRRRMLRRGRRYRKTRYRKPRFDNRRRPEGWLPPSLMSRVHNIETWVTRLRRWAPITHLSIQLVSFDTQKLQYPEISGVEYQQGTPYGYEVREYLLEKWGRKCAYCGAENVPLEIDHVIPRSRGGSDRVSNLVLACHRCNQAKANRSVEEFLAHDEERLHRIQAQLKLSLRDAAAVNTTRWAVFRRLKDTGLPVEAGSGGRTKYNRFSQGYPKAKWIDAACVGESGQYVGLDTQMQVLTIVAKGHGKRQRCITDKYGFPRSHAPSSRTYMGSAQAIWYRRISREGSTPGHMSGA

SEQ ID NO: 24864 - protein, 478 aa, synthetic construct; identical to SEQ ID NO: 24531

SEQ ID NO: 24865 - protein, 478 aa, synthetic construct; identical to SEQ ID NO: 24531

SEQ ID NO: 24866 - protein, 443 aa, synthetic construct
MMKVFVLDKDHKPLMPCGPARARKLLKAGRARVHKLQPFTIRIVDRSLADSVVQKVVVKVDPGSKETGIAVVREDEEETHHALYFINLKHRGAAIRDALTSRRQLRRGRRSRNLRYRAPRFLNRSKPKGWLPPSLQHRVDTTLSWVNRLRRLAPVSGIAQELVKFDTQRMQNPEISGVEYQQGELAGYELKEYLLEKFGRRCVYCAKSGVPLNVEHIVPKARGGSNRLSNLAIACVECNQKKGAKPIEEFLKGKPELLARVRKQLKTPLRDAASVNATRWALFHALSATGLPVRTGSGALTKYNRHCFGVPKEHWFDALCVGRINGVSYDSCMKVLNVSCTGRGQYKRTRTDKFGFPICHFMRTKRPHGVGLGDLVRMTVQKGKHPGIWTGRAFPSNDGSVVLILPEFRIKGRARNCSILSLSDGYGYCLTDSETAKPTSFGK

SEQ ID NO: 24867 - protein, 478 aa, synthetic construct; identical to SEQ ID NO: 24531

SEQ ID NO: 24868 - protein, 464 aa, synthetic construct; identical to SEQ ID NO: 24824

SEQ ID NO: 24869 - protein, 478 aa, synthetic construct; identical to SEQ ID NO: 24531

SEQ ID NO: 24870 - protein, 452 aa, unidentified; identical to SEQ ID NO: 24570

SEQ ID NO: 24871 - protein, 454 aa, Lactobacillus sp.; identical to SEQ ID NO: 24536

SEQ ID NO: 24872 - protein, 500 aa, synthetic construct; identical to SEQ ID NO: 24543

SEQ ID NO: 24873 - protein, 478 aa, synthetic construct; identical to SEQ ID NO: 24842

SEQ ID NO: 24874 - protein, 431 aa, unidentified
  source 1..431: note = Bacteroidia sp.
MYIYVQAQDGTPLMPTSRCGKLRRMLRDGKAVIVSHTPFTVRLTYDTTHHTQPVSLGVDSGSKYIGISATTNSKELYAAQIELRTDIVDNLSTRRESRRTRRSKRSIRYRAPRFNNRRASKRAGWLAPSVRQKVHSHTKAVQDICRILPVTSVTVEVAQFDTQWLKNPDITGTDYQHGPQLGFWNLREYVLFRDNHQCQHCHGKSKDSILNVHHLESRKTGGDSPDNLITLCESCHKAFHRGEFELKTKRSSQPLRDAAAMSIMRWRVYNELKESLGVPVHLTYGYYTKHLRIENGLEKTHAIDARCISGHPSVIPADDVFHYRQLRKHNRKVMKSNMLSGGRWKRNQAPCQIKDFRRFDIVTYKNTQCYINSLRTRGYFSIKSFDNKVISNDMSYKSLGLVRHSGRSLFHKERGLKTRFPAPSKDGSTLA

SEQ ID NO: 24875 - protein, 453 aa, unidentified; identical to SEQ ID NO: 24539

SEQ ID NO: 24876 - protein, 460 aa, synthetic construct
LARGTLRQRSILWNRLLPDSRTGKDFFMQPHIRAFVLDKDRKPLMPCHAARARKLLKKGKAAVFRRFPFTIILKERTREASAVQDVLVKIDPGSKSTGIAVVRKDKKDVHHALAFICLNHRGSKIRDALTSRRQLRRGRRSRNLRYRAPRFLNRTKPQGSLAPSLRHRVDTVMSWMNRLTRLVPVTGFVQELVKFDTQLMQNAAISGVEYQQGELAGYELKEYLLEKFDRKCVYCGKSGVVLNVEHIIPKARGGSNRVSNLAIACVQCNQKKGAMPIEDFLKKKPALLAQIRKQLKTTLRDAAAVNATRWSLFRSLQSTGCTVEVGSGAQTKFNRHAFSVPKEHWLDALCTGRIDGVADWEKLRPLQAYCIGRGSHKRTRTDKYGFPLCYFSRRKRPNDFGTGDYVRVKVTRGRNAGIWTGRATLTDGKLSVETKAGRVKATFLNSKCLFKSDGYKYQYL

SEQ ID NO: 24877 - protein, 430 aa, Streptomyces sp.; identical to SEQ ID NO: 24819
  VARIANT 430: note = X can be any naturally occurring amino acid

SEQ ID NO: 24878 - protein, 464 aa, synthetic construct; identical to SEQ ID NO: 24793

SEQ ID NO: 24879 - protein, 478 aa, synthetic construct; identical to SEQ ID NO: 24703

SEQ ID NO: 24880 - protein, 478 aa, synthetic construct
MTGNCTRSVKGKNKMPVCVLSANGERLMPTENYGKVRHLLKDGRAVIAKRNPFTIQLTYDTSTYTQPIEMCVGTGYEHIGVSIKTKAKEVVSQQYDMLTNERSRHDDCRAYRRTRRNRLRYRAARFNNRVSGKKPGWIAPSLDNKVERHLDIISRYLSVMPVTDVFIKAATYDTQLLAALEAGEPVPQGKDYQHGPQYGYDTLREAVFERDHYTCVYCKRGLKDGAILHVHHAYYWKGLHGNSMRELATCCEKCNTPANHKEGGKLWGFDKPLRKYTGEAFMNSVRWILYQRAMAHFQGVAEVHMTYGVISKRVRTNLGLPYSCATDAYCMGELRPEARCETEVFQKYRRNNRVLSKFYDAKYYDTREKGVIRSGNELSSGRTNRNHNLDGENLRRFRGCKKSKGRTSTRKQRYAMQPGDIVVYGNRKYVSKGCSSYGRALSLLTDGKPLMVSMKKIQLVRHKGGWVRLPHAAAEAKK

SEQ ID NO: 24881 - protein, 457 aa, unidentified
  REGION 1..457: note = IscB polypeptide
MQRVFVVDTNLRPLGPCQPGRARLLLCNGKAAVWRQYPFTIILKHEVEGAVPETELRIKPVSKITGIALIGKFQRGDVVACADDIHHRGKAIRKALTSRSAIRRGRRNRNTRYRQPRFKNRTRSKGWLPPSIQSRVYNVETWVKKIVRLAPVGSIAIETSSFDTQKLQNPEISGVEYQQGTLAGYEVKEYLLEKWGRKCAYCEKKDVPLQLDHIKPRSPKYGAGGSDRISNLTLACPDCNQKKGNLPVEVFLADRPDVLRQIRAQVKAPLRDAAAINATRYAIGRVIKALGLPTSFWSGGRTKFNRTSQGYPKAHWIDAACVGENGGNVIIPPAMTPLCVKACGHGSRQMCSVDRFGFPRSKAKGARVVKGFRTGDIVQAIVPTGKKAGKHTGRVSIRSRGYFNINAATGTVTDISYKHCAVLHRADGYNYQITEKETALLPMAEARGPRAAIAWWE

SEQ ID NO: 24882 - protein, 478 aa, synthetic construct; identical to SEQ ID NO: 24531

SEQ ID NO: 24883 - protein, 478 aa, synthetic construct; identical to SEQ ID NO: 24701

SEQ ID NO: 24884 - protein, 478 aa, synthetic construct; identical to SEQ ID NO: 24568

SEQ ID NO: 24885 - protein, 478 aa, synthetic construct; identical to SEQ ID NO: 24531

SEQ ID NO: 24886 - protein, 433 aa, synthetic construct
MQSHIRAFVLDKDRKPLMPCHAAKARKLLKKGKAAVFRRFPFTIILKERTREASAIQDVLVKVDPGSKSTGLAVVRKDEKNVHHALAFICLNHRGSKIRDALTSRRQLRRGRRSRNLRYRAPRFLNRKKPKGWLAPSLQHRVDAVMSWMNRLTRLVPVAGFVQELVKFDTQLMQNAAISGVEYQQGELAGYELKEYLLEKFDRKCVYCGKSGVVLNVEHIIPKARGGSNRVSNLAIACTQCNQKKGAMPIEDFLKKKPALLAQIRKQLKTPLRDATAVNATRWALYRNLQATGCTVEVGSGALTKFNRHAFSVPKEHWLDALCAGRIDGVADWEKLRPLQAYCIGRGSHKRTRTDKYGFPLCYFSRYKRPNDFGTGDYVRVKVTRGRNTGIWIGRATLTDGKLSVETKAGRVKATFLNSKCLFKSDGYKYQYL

SEQ ID NO: 24887 - protein, 501 aa, synthetic construct; identical to SEQ ID NO: 24556

SEQ ID NO: 24888 - protein, 433 aa, synthetic construct
MQTHIRAFVLDKDRKPLMPCHAARARKLLKKGKAAVFRRFPFTIILKERTREVSVVQDVLVKIDPGSKSTGIAVVRKDKKDVHHALAFICLNHRGSKIRDALTSRRQLRRGRRSRNLRYRSPRFLNRTKPKGWLAPSLQHRVDTVMSWMNRLTRLVPVTGFVQELVKFDTQRMQNAAISGVEYQQGELAGYELKEYLLEKFDRKCVYCGKSGVVLNVEHIIPKARGGSNRVSNLAIACVQCNQKKGAMPIEDFLKKKPALLAQIRKLLKTPLRDAATVNATRWSLFRSLQAMGGAVAVGSGALTKFNRHAFCVPKEHWLDALCAGRINGVADWENLRPLQAYCIGRGSHKRTRTDKYGFPLCYFSRRKRPNDFGTGDYVRVKVTRGRNAGIWTGRATLTNGKLSVETKVGRVKATFQNGKVLFKNDGYKYQYL

SEQ ID NO: 24889 - protein, 373 aa, synthetic construct
VKVDPGSKSTGLAVVRKDEKNVHHALAFICLNHRGSKIRDALTSRRQLRRGRRSRNLRYRAPRFLNRKKPKGWLAPSLQHRVDAVMSWMNRLTRLVPVAGFVQELVKFDTQLMQNAAISGVEYQQGELAGYELKEYLLEKFDRKCVYCGKSGVVLNVEHIIPKARGGSNRVSNLAIACAQCNQKKGAMPIEDFLKKKPALLAQIRKQLKTPLRDAAAVNATRWALYRNLQATGCTVEIGSGALTKFNRHAFSVPKEHWLDALCAGRIDGVADWENLRPLQAYCIGRGSHKRTRTDKYGFPLCYFSRYKRPNDFGTGDYVRVKVTRGRNTGIWIGRATLTDGKLSVETKAGRVKATFLNSKCLFKSDGYKYQYL

SEQ ID NO: 24890 - protein, 491 aa, unidentified
  source 1..491: note = Chloroflexales sp.
MSSPVFVQDSQGTPLMPTSAAYARRLLQQGKAQWVPHHAFPVIQLTHAIQQPTLRPILIGVAIHLNAANLYLIAEGEQAALPLLHTIVDLRTDLPTRLRRRAAHRKRRRNRARYRAPRKHGRPFKLRRPSMLRSAWSQQVHRGRQPTPMRVRHLSHTIRWRSQAIMRVICALQKLLPISHAIILSPAELRGPQEMSGTALRQLLIDTYGQIDTAGNRHPMCAYCLTTEGRIEAEHIIPRSRGGTDGWQNRVLACAACNARKGNRLPEEADMPLRIPLHSEPASPNRAGSYARATGRALIESLRVLGLPTRLLHQADDPRTHWPVALYPELLKIWETSDSVAKAVAKPISRPSKQVFTGRNYPLDTKLRPGMVRLGSAIRRRVQVNRAIVIEIAKTRRAVRIIGANEPIPASATQVIMLGALCEGLRREQRVVGIVAALHTAGRLTLLVPENAGSTGVNWRRVVISPRRHLRILSTDPIIFLPLPTRDDHAS

SEQ ID NO: 24891 - protein, 478 aa, synthetic construct; identical to SEQ ID NO: 24531

SEQ ID NO: 24892 - protein, 464 aa, synthetic construct; identical to SEQ ID NO: 24557

SEQ ID NO: 24893 - protein, 493 aa, synthetic construct
APPQTEHHAVDVPHRMTGNCTRSVKGKNKMPVCVLSANGERLMPTENYGKVRHLLKDGRAVIAKRNPFTIQLTYDTSTYTQPIEMCVGTGYEHIGVSIKTKAKEVVSQQYDMLTNERSRHDDCRAYRRTRRNRLRYRAARFNNRVSGKKPGWIAPSLDNKVERHLDIISRYLSVMPVTDVFIKAATYDTQLLAALEAGEPVPQGKDYQHGPQYGYDTLREAVFERDHYTCVYCKRGLKDGAILHVHHAYYWKGLHGNSMRELATCCEKCNTPANHKEGGKLWGFDKPLRKYTGEAFMNSVRWILYQRAMARFQGVAEVHMTYGVISKRVRTNLGLPYSCATDAYCMGELRPEARCETEVFQKYRRNNRVLSKFYDAKYYDTREKGVIRSGNELSSGRTNRNHNLDGENLRRFRGCKKSKGRTSTRKQRYAMQPGDIVVYGNRKYVSKGCSSYGRALSLLTDGKPLVVSMKKIQLVRHKGGWVRLPQAAAGAKE

SEQ ID NO: 24894 - protein, 569 aa, synthetic construct
MPDKVYVISRLGHPLMPCSPAKAHHLLDDKKAKVVKRMPFTIRLLYGSTKYIQPIILGVDAGSKTIGLSASTAKEEVFAAEVMPRNDVVENLSTRREFRRARRNRTTRYRKPRSDNRVRSNHERWLAPSVKVKIQEHITSIKRVCTILPISKVVIETAEFDLQLLKAIQEGKPIPEGEDYQKGEMYGSYNVRQYVLWRDNYTCICCGVRGTPKNPVRLHVHHFESRKHGGNAPDNHGTLCDDCHKKFHLGIITDVKLKTRRRQSTRDAAFMGIARSEYNYVYSKQSKIFHTRKCSHVLLAYDIQGTVSYDTCLKSGRRPCKHCNPEPIERKTIAFPVLPKKPQSPQERSLSKDEQSAIGRFNRAKQEREAAFKKGSLSDAEKSNIMALSQPGLAFWASKGYRTFHRRNCSQISGLNQLVGFPRYQDAVRAGYCPCRHCKPSPKQDVVYSIPITNKKRAGEGVETLVQLCTEHCLPFHHDNRYFEMQTMVGKWKIDMDLRPVRLEHINLISQPENTKKYHVQPRLFLSLKDTFDYIKLVVSKNEKSVLKITELSIAAAELSALVFFKALL

SEQ ID NO: 24895 - protein, 452 aa, Lactobacillus sp.; identical to SEQ ID NO: 24570

SEQ ID NO: 24896 - protein, 478 aa, synthetic construct; identical to SEQ ID NO: 24594

SEQ ID NO: 24897 - protein, 416 aa, unidentified; identical to SEQ ID NO: 24575

SEQ ID NO: 24898 - protein, 478 aa, synthetic construct; identical to SEQ ID NO: 24531

SEQ ID NO: 24899 - protein, 366 aa, synthetic construct
MAVCVLSANGERLMPTENYGKVRHLLKDGRAVIAKRNPFTIQLTYDTSTYTQPIEMCVGTGYEHIGVSIKTKAKEVVSQQYDLLTNERSRHDDCRAYRRTRRNRLRYRAARFNNRVSSKKPGWIAPSLDNKVERHLDIISRYLSVMPVKDVFIKAATYDTQLLAALEAGEPVPQGKDYQHGPQYGYDTLREAVFERDHYTCVYCKRGLKDGAILHVHHAYYWKGLHGNSMRELATCCEKCNTPANHKEGGKLWGFDKPLRKYTGEAFMNSVRWILYQRAMARFQGVAEVHMTYGVISKRVRTNLGLPYSCATDAYCMGELRPEARCETEVFQKYRRNNRVLSKFYDAKYYDCLLYTSPSPRDYAAS

SEQ ID NO: 24900 - protein, 469 aa, synthetic construct
MPVCVLSANGERLMPTENYGKVRHLLKDGRAVIAKRNPFTIQLTYETSTYTQPIELCVGTGYEHIGVSIKAKAKEVVSQQYDLLTNERSRHDDCRAYRRTRRNRLRYRAARFNNRVSSKMPGWIAPSLDNKVERHLDIISRYLSVMPVKDVFIKAATYDTQLLAALEAGEPVPQGKDYQHGPQYGYDTLREAVFERDHYTCVYCKRGLKDGAILHVHHAYYWKGLHGNSMRELATCCEKCNTPANHKEGGKLWGFDKPLRKYTGEAFMNSVRWILYQRAMARFQGAAEVHMTYGVISKRVRTNLGLPYSCATDAYCMGELRPEARCETEVFQKYRRNNRVLSKFYDAKYYDTREKGVIRSGNELFSGRTNRNHNLDGENLRRFRGCKKSKGRTSTRKQRYAMQPGDIVVYGNRKYVSKGCSSYGKALSLLTDGKPLMVSMKKIQLVRHKGGWVRLPHAAAEAKKITTCG

SEQ ID NO: 24901 - protein, 443 aa, synthetic construct
MMKVFVLDKDHKPLMPCGPARARKLLKAGRARVHKLQPFTIRIVDRSLADSVVQKVVVKVDPGSKETGIAVVREDEEETHHALYFINLKHRGAAIRDALTSRRQLRRGRRSRNLRYRASRFLNRSKPKGWLPPSLQHRVDTTLSWVNRLRRLAPVSGIAQELVKFDTQLMQNPDISGVEYQQGELAGYELKEYLLEKFGRRCVYCAKSDVPLNVEHIVPKARGGSNRLSNLAIACVECNQKKGAKPIEEFLKGKPELLARVRKQLKTPLRDAASVNATRWALFHALSATGLPVRTGSGALTKYNRHCFGVPKEHWFDALCVGRINGVSYDSCMKVLNVSCTGRGQYKRTRTDKFGFPICHFMRTKRPHGVGLGDLVRMTVQKGKHPGIWTGRAFPSNDGRVVLILPEFRIWGRARNCSILSLSDGYGYRLTDSETTKPTSFGK

SEQ ID NO: 24902 - protein, 464 aa, synthetic construct; identical to SEQ ID NO: 24525

SEQ ID NO: 24903 - protein, 464 aa, synthetic construct; identical to SEQ ID NO: 24576

SEQ ID NO: 24904 - protein, 460 aa, synthetic construct; identical to SEQ ID NO: 24625

SEQ ID NO: 24905 - protein, 478 aa, synthetic construct; identical to SEQ ID NO: 24531

SEQ ID NO: 24906 - protein, 455 aa, synthetic construct; identical to SEQ ID NO: 24633

SEQ ID NO: 24907 - protein, 478 aa, synthetic construct
MTGNCTRSVKGKNKMPVCVLSANGERLMPTENYGKVRHLLKDGRAVIAKRNPFTIQLTYDTSTYTQPIEMCVGTGYEHIGVSIKTKAKEVVSQQYDMLTNERSRHDDCRAYRRTRRNRLRYRAARFNNRVSGKKPGWIAPSLDNKVERHLDIISRYLSVMPVTDVFIKAATYDTQLLAALEAGEPVPQGKDYQHGPQYGYDTLREAVFERDHYTCVYCKRGLKDGAILHVHHAYYWKGLHGNSMRELATCCEKCNTPANHKEGGKLWGFDKPLRKYTGEAFMNSVRWILYQRAMARFQGVAEVHMTYGVISKRVRTNLGLPYSCATDAYCMGELRPEARCETEVFQKYRRNNRVLSKFYDAKYYDTREKGVIRSGNELSSGRTNRNHNLDGENLRRFRGCKKSKGRTSTRKQRYAMQPGDIVVYGNRKYVSKGCSSYGRALSLLTDGKPLMVSMKKIQLVRHKGGWVRLPHAAAAAKK

SEQ ID NO: 24908 - protein, 432 aa, unidentified
  REGION 1..432: note = Ga0315298_1009712
MTQNRVLVLDRNRQPLMPCHPARARELLRDGKAAVFRRQPFTIILKDREGGVTQDIQAKTDPGSQETGVALVANFARRGPTVIWAGELTHRGDRIRKALEQRKGHRRFRRSRLRYRPVRFLNRTRKAGWLPPSLQHRVDTIMTWIWRFLRWSPVTALSQELVRFDTQALQNPEISGVEYQQGTLQGYEVREYLLEKWNRKCAYCGAEQVPLEIDHIHPRGKGGSDRVSNLTLACHLCNQRKGKREVAEFLAKDPERIRRILAQAKAPLRDAAAVNSTRWALFQRLRATNLPVEVGSGGRTKWNRSRQSYPKAHWIDAACVGESGGKVRLHPDHQILKIKAMGHGERQRSRLDRYGFPIGHKAGAKSFWGFQTGDRVRAVIVKGKHAGTWIGRIAIRFRPSFVLHSSVGDRSLEVHPKYLTLLQRNDGYVYTQ

SEQ ID NO: 24909 - protein, 478 aa, synthetic construct
MTGNCTRSVKGKNKMPVCVLSANGERLMPTENYGKVRHLLKDGRAVIAKRNPFTIQLTYDTSTYTQPIEMCVGTGYEHIGVSIKTKAKEVVSQQYDMLTNERSRHDDCRAYRRTRRNRLRYRAARFNNRVSGKKPGWIAPSLDNKVERHLDIISRYLSVMPVTDVFIKAATYDTQLLAALEAGEPVPQGKDYQHGPQYGYDTLREAVFERDHYTCVYCKRGLKDGAILHVHHAYYWKGLHGNSMRELATCCEKCNTPANHKEGGKLWGFDKPLRKYTGEAFMNSVRWILYQRAMARFQGVAEVHMTYGVISKRVRTNLGLPYSCATDAYCMGERRPEARCETEVFQKYRRNNRVLSKFYDAKYYDTREKGVIRSGNELSSGRTNRNHNLDGENLRRFRGCKKSKGRTSTRKQRYAMQPGDIVVYGNRKYVSKGCSSYGRALSLLTDGKPLMVSMKKIQLVRHKGGWVRLPHAAAEAKK

SEQ ID NO: 24910 - protein, 464 aa, synthetic construct; identical to SEQ ID NO: 24525

SEQ ID NO: 24911 - protein, 464 aa, synthetic construct; identical to SEQ ID NO: 24576

SEQ ID NO: 24912 - protein, 478 aa, synthetic construct
MTGNCTRSVKGKNKMPVCVLSANGERLMPTENYGKVRHLLKDGRAVIAKRNPFTIQLTYDTSTYTQPIEMCVGTGYEHIGVSIKTKAKEVVSKQYDMLTNERSRHDDCRAYRRTRRNRLRYRAARFNNRVSGKKPGWIAPSLDNKVERHLDIISRYLSVMPVTDVFIKAATYDTQLLAALEAGEPVPQGKDYQHGPQYGYDTLREAVFERDHYTCVYCKRGLKDGAILHVHHAYYWKGLHGNSMRELATCCEKCNTPANHKEGGKLWGFDKPLRKYTGEAFMNSVRWILYQRAMARFQGVAEVHMTYGVISKRVRTNLGLPYSCATDAYCMGELRPEARCETEVFQKYRRNNRVLSKFYDAKYYDTREKGVIRSGNELSSGRTNRNHNLDGENLRRFRGCKKSKGRTSTRKQRYAMQPGDIVVYGNRKYVSKGCSSYGRALSLLTDGKPLMVSVKKIQLVRHKGGWVRLPQAAAGAKE

SEQ ID NO: 24913 - protein, 478 aa, synthetic construct; identical to SEQ ID NO: 24701

SEQ ID NO: 24914 - protein, 460 aa, synthetic construct
LARGTLRQRSILWNRLLPDSRKGKDFFMQPHIRAFVLDKDRKPLMPCHAARARKLLKKGKAAVFRRFPFTIILKERTREASAVQDVLVKIDPGSKSTGIAVVRKDKKDVQHALAFICLNHRGSKIRDALTSRRQLRRGRRSRNLRYRAPRFLNRTKPQGSLAPSLRHRVDTVMSWMNRLTRLVPVTGFVQELVKFDTQLMQNAAISGVEYQQGELAGYELKEYLLEKFDRKCVYCGKSGVVLNVEHLIPKARGGSNRVSNLAIACVQCNQKKGAMPIEDFLKKKPALLAQIRKQLKTTLRDAAAVNATRWSLFRSLQSTGCTVEVGSGAQTKFNRHAFSVPKEHWLDALCTGRIDGVADWEKLRPLQAYCIGRGSHKRTRTDKYGFPLCYFSRRKRPNDFGTGDYVRVKVTRGRNAGIWTGRATLTDGKLSVETKAGRVKATFLNSKCLFKSDGYKYQYL

SEQ ID NO: 24915 - protein, 464 aa, synthetic construct; identical to SEQ ID NO: 24793

SEQ ID NO: 24916 - protein, 443 aa, synthetic construct
MMKVFVLDKDHKPLMPCGPARARKLLKAGRARVHKLQPFTIRIVDRSLADSVVQKVVVKVDPGSKETGIAVVREDEEETHHALYFINLKHRGAAIRDALTSRRQLRRGRRSRNLRYRAPRFLNRSKPKGWLPPSLQHRVDTTLSWVNRLRRLAPVSGIAQELVKFDTQRMQNPEISGVEYQQGELAGYELKEYLLEKFGRRCVYCAKSGVPLNVEHIVPKARGGSNRLSNLAIACVECNQKKGARPIEEFLKGKPELLARIRKRLKTPLRDAASVNATRWALFEALRATGLPIRTGSGALTKYNRHCFGVPKEHWFDALCVGRINGVSYDSCMKVLNVSCTGRGQYKRTRTDKFGFPICHFMRTKRPHGVGLGDLVRMTVQKGKHPGIWTGRAFPSNDGRVVLILPEFRIWGRARNCSILSLSDGYGYRLTDSETTKPTSFGK

SEQ ID NO: 24917 - protein, 453 aa, unidentified; identical to SEQ ID NO: 24539

SEQ ID NO: 24918 - protein, 433 aa, synthetic construct; identical to SEQ ID NO: 24672

SEQ ID NO: 24919 - protein, 500 aa, synthetic construct; identical to SEQ ID NO: 24707

SEQ ID NO: 24920 - protein, 344 aa, synthetic construct
LYVHAAREIAALLEGVHELRRGRRSRNLRYRAPRFLNRKKPKGWLAPSLQHRVDAVMSWMNRLTRLVPVAGFVQELVKFDTQLMQNAAISGVEYQQGELAGYELKEYLLEKFDRKCVYCGKSGVVLNVEHIIPKARGGSNRVSNLAIACTQCNQKKGAMPIEDFLKKKPALLAQIRKQLKTTLRDAAAVNATRWSLFRSLQSTGCTVEVGSGAQTKFNRHAFSVPKEHWLDALCTGRIDGVADWEKLRPLQAYCIGRGSHKRTRTDKYGFPLCYFSRRKRPNDFGTGDYVRVKVTRGRNAGIWTGRATLTDGKLSVETKAGRVKATFLNSKCLFKSDGYKYQYL

SEQ ID NO: 24921 - protein, 443 aa, synthetic construct
MMKVFVLDKDHKPLMPCGPARARKLLKAGRARVHKLQPFTIRIVDRSLADSVVQKVVVKVDPGSKETGIAVVREDEEETHHALYFINLKHRGAAIRDALTSRRQLRRGRRSRNLRYRAPRFLNRSKPKGWLPPSLQHRVDTTLSWVNRLRRLAPVSGIAQELVKFDTQLMQNPDISGVEYQQGELAGYELKEYLLEKFGRRCVYCAKSDVPLNVEHIVPKARGGSNRLSNLAIACVECNQKKGARPIEEFLKGKPELLARVRKQLKTPLRDAASVNATRWALFHALSATGLPVRTGSGALTKYNRHCFGVPKEHWFDALCVGRINGVSYDSCMKVLNVSCTGRGQYKRTRTDKFGFPICHFMRTKRPHGVGLGDLVRMTVQKGKHPGIWTGRAFPSNDGRVVLILPEFRIWGRARNCSILSLSDGYGYRLTDSETTKPTSFGK

SEQ ID NO: 24922 - protein, 464 aa, synthetic construct
MAVCVLSANGERLMPTENYGKVRHLLKDGRAVIAKRNPFTIQLTYDTSTYTQPIEMCVGTGYEHIGVSIKTKAKEVVSQQYDLLTNERSRHDDCRAYRRTRRNRLRYRAARFNNRVSSKKPGWIAPSLDNKVERHLDIISRYLSVMPVKDVFIKAATYDTQLLAALEAGEPVPQGKDYQHGPQYGHDTLREAVFERDHYTCVYCKRGLKDGAILHVHHAYYWKGLHGNSMRELATCCEKCNTPANHKEGGKLWGFDKPLRKYTGEAFMNSVRWILYQRAMARFQGAAEVHMTYGVISKRVRTDLGLPYSCATDAYCMGELRPEARCDTEVFQKYRRNNRVLSKFYDAKYYDTREKGVIRSGNDLSSGRTNRNHNLDGENLRRFRGCKKSKGRTSTRKQRYAMQPGDIVVYGNRKYVSKGCSSYGRALSLLTDGKPLMVSTKKIQLVRPKGGWVRLPQAAVGAKE

SEQ ID NO: 24923 - protein, 443 aa, synthetic construct
MMKVFVLDKDHKPLMPCGPARARKLLKAGRARVHKLQPFTIRIVDRSLADSVVQKVVVKVDPGSKETGIAVVREDEEETHHALYFINLKHRGAAIRDALTSRRQLRRGRRSRNLRYRAPRFLNRSKPKGWLPPSLQHRVDTTLSWVNRLRRLAPVSGIAQELVKFDTQLMQNPDISGVEYQQGELAGYELKEYLLEKFGRRCVYCAKSDVPLNVEHIVPKARGGSNRLSNLAIACVECNQKKGAKPIEEFLKGKPELLARVRKQLKTPLRDAASVNATRWALFHALSATGLPVRTGSGALTKYNRHCFGVPKEHWFDALCVGRINGVSYDSCMKVLNVSCTGRGQYKRTRTDKFGFPICHFMRTKRPHGVGLGDLVRMTVQKGKHPGIWTGRAFPSNDGSVVLILPEFRIKGRARNCSILSLSDGYGYCLTDSETAKPTSFGK

SEQ ID NO: 24924 - protein, 433 aa, synthetic construct; identical to SEQ ID NO: 24682

SEQ ID NO: 24925 - protein, 411 aa, synthetic construct
VHKLQPFTIRIVDRSLADSVVQPIIVKVDPGSKETGIAVVREDEEETHHALYFINLKHRGAAIRDALTSRRQLRRGRRSRNLRYRAPRFLNRSKPKGWLPPSLQHRVDTTLSWVNRLRRLAPVSGIAQELVKFDTQRMQNPEISGVEYQQGELAGYELKEYLLEKFGRRCVYCAKSGVPLNVEHIVPKARGGSNRLSNLAIACVECNQKKGARPIEEFLKGKPELLARIRKRLKTPLRDAASVNATRWALFEALRATGLPIRTGSGALTKFNRHCFGVPKEHWFDALCVGRINGVSYEPGMKVLNVSCTGRGQYKRTRTDKFGFPICHFMRTKRPHGVGLGDLVRMTVQKGKHPGIWTGRAFPSNDGRVVLILPEFRIWGRARNCSILSLSDGYGYCLTDSETAKPTSFGK

SEQ ID NO: 24926 - protein, 478 aa, synthetic construct; identical to SEQ ID NO: 24531

SEQ ID NO: 24927 - protein, 453 aa, unidentified; identical to SEQ ID NO: 24695

SEQ ID NO: 24928 - protein, 464 aa, synthetic construct; identical to SEQ ID NO: 24684

SEQ ID NO: 24929 - protein, 478 aa, synthetic construct; identical to SEQ ID NO: 24531

SEQ ID NO: 24930 - protein, 417 aa, synthetic construct; identical to SEQ ID NO: 24686

SEQ ID NO: 24931 - protein, 443 aa, synthetic construct; identical to SEQ ID NO: 24617

SEQ ID NO: 24932 - protein, 429 aa, unidentified
  source 1..429: note = Candidate division MSBL1 archaeon
MSKKVYVQNKDGTPLMPCKPAKARHLLRDDKAEVVEKTPFTIRLNWDCEENTQQVRLGIDTGSKKAGIAAVRENGQLLYQSKVELRTDVKQKMDRRRRYRRTRRNRKTRYRKPRFDNRKRKKGWLPPSLKSKANSTIKSVKQVSKLLPISSVTVEIAPFDMQKIKNPGIEGEQYQNGELKGHSSVRQYVLYRDKHQCINCKKDDVPLQVHHLKPRSKGGTEKPGNMVSLCVECHEKLHRDEIELSEKSLNYWTNKEYKYASHVNSMKNYLVKELRKLFNVKITFGNVTKAARKELGLDKSDVNDAIAIACLDFAKRIRKLSHTFLQKCLPRGRYQLYKGERSERRIPTEGFNGFDRWDKVELPNGTMGFVKGRRKSGYFDVSDINGNSYTHSIKYTKLNLISKAETIITELKGNSSPLNQRLEGVSLPG

SEQ ID NO: 24933 - protein, 478 aa, synthetic construct; identical to SEQ ID NO: 24701

SEQ ID NO: 24934 - protein, 478 aa, synthetic construct; identical to SEQ ID NO: 24531

SEQ ID NO: 24935 - protein, 452 aa, Lactobacillus sp.; identical to SEQ ID NO: 24570

SEQ ID NO: 24936 - protein, 478 aa, synthetic construct; identical to SEQ ID NO: 24531

SEQ ID NO: 24937 - protein, 500 aa, synthetic construct
MTGSYTAAPPQTEHHAVDVPHRMTGNCTRSVKGKNKMPVCVLSANGERLMPTENYGKVRHLLKDGRAVIAKRNPFTIQLTYETSTYTQSIEMCVGTGYEHIGVSIKTKAKEVVSQQYDLLTNERSRHDDCRAYRQTRRNHLRYRAARFNNRVSSKKPGWIAPSLDNKVERHLDIISRYLSVMPVTDVFIKAATYDTQLLAALEAGEPVPQGKDYQHGPQYGFDTLREAVFERDHYTCVYCKRGLKDGAILHIHHAYYWKGLHGNSMRELATCCEKCNTPANHKEGGKLWGFDKPLRKYTGEAFMNSVRWILYQRAMARFQGAAEVHMTYGVISKRVRTDLGLPYSCATDAYCMGELRPEARCETEVFQKYRRNNRVLSKFYDAKYYDTREKGVIRSGNELSSGRTNRNHNLDGENLRRFRGCKKSKGRTSTRKQRYAMQPGDIVVYGNRKYVSKGCSSYGRALSLLTDGKPLVVSMKKIQLVRHKGGWVRLPQAAAGAKE

SEQ ID NO: 24938 - protein, 460 aa, synthetic construct
LARGTLRQRSILWNRLLPDSRKGKDFFMQPHIRAFVLDKDRKPLMPCHAARARKLLKKGKAAVFRRFPFTIILKERTREASAVQDVLVKIDPGSKSTGIAVVRKDKKDVHHALAFICLNHRGSKIRDALTSRRQLRRGRRSRNLRYRSPRFLNRTKPKGWLCALSRHRVDTVMSWMNRLTRLVPVTGFVQELVKFDTQLMQNAAISGVEYQQGELAGYELKEYLLEKFDRKCVYCGKSGVVLNVEHIIPKARGGSNRVSNLAIACVQCNQKKGAMPIEDFLKKKPALLAQIRKQLKTTLRDAAAVNATRWSLFRSLQSTGCTVEVGSGAQTKFNRHAFSVPKEHWLDALCTGRIDGVADWEKLRPLQAYCIGRGSHKRTRTDKYGFPLCYFSRRKRPNDFGTGDYVRVKVTRGRNAGIWTGRATLTDGKLSVETKAGRVKATFLNSKCLFKSDGYKYQYL

SEQ ID NO: 24939 - protein, 416 aa, Lactobacillus sp.; identical to SEQ ID NO: 24575

SEQ ID NO: 24940 - protein, 464 aa, synthetic construct; identical to SEQ ID NO: 24525

SEQ ID NO: 24941 - protein, 360 aa, unidentified; identical to SEQ ID NO: 24649

SEQ ID NO: 24942 - protein, 433 aa, Sutterella sp.; identical to SEQ ID NO: 24563

SEQ ID NO: 24943 - protein, 448 aa, Lactobacillus sp.; identical to SEQ ID NO: 24592

SEQ ID NO: 24944 - protein, 470 aa, unidentified
  source 1..470: note = Gammaproteobacteria bacterium
MAVLILDKRKNPLMPCSEKRARLLLERGRARVHRKAPFIIRLVDRGVEDSALQPLRLKLDPGSKTTGIALVRERETVDPATGKSTRAQAVVFLAELAHRGHLIRDRLTARRAFRRRRRGTLRYRAPRFLNRTRPRGWLAPSLRHRVDTTMVWVDRLMRWAPVAGLSTLLHRFDTQALQNPGISGIEYQHGTLTGYEVREYLLEKWRRRCAYCDAENVPLTVDHIHPKSRGGSDRVSNLALACVPCNQRKGNRDVTEFLLHDPKRLAHIEAQRKAPLKDAAAVNSTRWALLGRLKKTGLDVEVGTGGRTKYNRARLSIPKTHSLDAACVGRVDRLSGWRRPVLRIAATGRGAYQRTRLTKYGFPRGYLTRQKRHFGFQTGDLVKAIVTSGRKAGTYIGRVAVRASGSFNIRTGQAVVQGLHHRFFTLIQRADGYGYSWTKIALEKGGAGTGAAVAAALSLPGLNAGVSRAN

SEQ ID NO: 24945 - protein, 478 aa, synthetic construct
MTGNCTRSVKGKNKMPVCVLSANGERLMPTENYGKVRHLLKDGRAVIAKRNPFTIQLTYDTSTYTQPIEMCVGTGYEHIGVSIKTKAKEVVSQQYDMLTNERSRHDDCRAYRRTRRNRLRYRAARFDNRVSGKKPGWIAPSLDNKVERHLDIISRYLSVMPVTDVFIKAATYDTQLLAALEAGEPVPQGKDYQHGPQYGYDTLREAVFERDHYTCVYCKRGLKDGAILHVHHAYYWKGLHGNSMRELATCCEKCNTPANHKEGGKLWGFDKPLRKYTGEAFMNSVRWILYQRAMARFQGVAEVHMTYGVISKRVRTNLGLPYSCATDAYCMGELRPEARCETEVFQKYRRNNRVLSKFYDAKYYDTREKGVIRSGNELSSGRTNRNHNLDGENLRRFRGCKKSKGRTSTRKQRYAMQPGDIVVYGNRKYVSKGCSSYGRALSLLTDGKPLMVSMKKIQLVRHKGGWVRLPHAAAEAKK

SEQ ID NO: 24946 - protein, 478 aa, synthetic construct; identical to SEQ ID NO: 24701

SEQ ID NO: 24947 - protein, 464 aa, synthetic construct; identical to SEQ ID NO: 24576

SEQ ID NO: 24948 - protein, 433 aa, synthetic construct; identical to SEQ ID NO: 24563

SEQ ID NO: 24949 - protein, 500 aa, synthetic construct; identical to SEQ ID NO: 24707

SEQ ID NO: 24950 - protein, 464 aa, synthetic construct; identical to SEQ ID NO: 24576

SEQ ID NO: 24951 - protein, 443 aa, synthetic construct
MMKVFVLDKDHKPLMPCGPARARKLLKAGRARVHKLQPFTIRIVDRSLADSVVQKVVVKVDPGSKETGIAVVREDEEETHHALYFINLKHRGAAIRDALTSRRQLRRGRRSRNLRYRAPRFLNRSKPKGWLPPSLQHRVDTTLSWVNRLRRLAPVSGIAQELVKFDTQRMQNPEISGVEYQQGELAGYELKEYLLEKFGRRCVYCAKSDVPLNVEHIVPKARGGSNRLSNLAIACVECNQKKGAKPIEEFLKGKPELLARVRKQLKTPLRDAASVNATRWALFEALRATGLPIRTGSGALTKFNRHCFGVPKEHWFDALCVGRINGVSYEPGMKVLNVSCTGRGQYKRTRTDKFGFPICHFMRTKRPHGVGLGDLVRMTVQKGKHPGIWTGRAFPSNDGRVVLILPEFRIWGRARNCSILSLSDGYGYRLTDSETTKPTSFGK

SEQ ID NO: 24952 - protein, 478 aa, synthetic construct; identical to SEQ ID NO: 24531

SEQ ID NO: 24953 - protein, 417 aa, synthetic construct; identical to SEQ ID NO: 24686

SEQ ID NO: 24954 - protein, 478 aa, synthetic construct; identical to SEQ ID NO: 24531

SEQ ID NO: 24955 - protein, 500 aa, synthetic construct
MTGSYTVKRRKRFPTVVDIPHRMTGNCTRSVKGKNKMPVCVLSANGERLMPTENYGKVRHLLKDGRAVIAKRNPFTIQLTYDTSTYTQPIELCVGTGYEHIGVSIKAKAKEVVSQQYDLLTNERSRHDDCRAYRRTRRNHLRYRAARFNNRVSSKKPGWIAPSLDNKVERHLDIISRYLSVMPVTDVFIKAATYDTQLLAALEAGEPVPQGKDYQHGPQYGYDTLREAVFERDHYTCVYCKRGLKDGAILHVHHAYYWKGLHGNSMRELATCCEKCNTPANHKEGGKLWGFDKPLRKYTGEAFMNSVRWILYQRAMARFQGVAEVHMTYGVISKRVRTNLGLPYSCATDAYCMGELRPEARCETEVFQKYRRNNRVLSKFYDAKYYDTREKGVIRSGNELSSGRTNRNHNLDGENLRRFRGCKKSKGRTSTRKQRYAMQPGDIVVYGNRKYVSKGCSSYGKALSLLTDGKPLMVSMKKIQLVRHKGGWVRLPHAAAEAKK

SEQ ID NO: 24956 - protein, 443 aa, synthetic construct; identical to SEQ ID NO: 24540

SEQ ID NO: 24957 - protein, 472 aa, unidentified
  source 1..472: note = Symploca sp.
VRGEVLRARNLEQHWRRTLPERVQLYVVEKMKVCVVNIGERPLMPTTPRKAKILLREGAAKIFRRDPFTIQLLSDCHGYIQPATLGIDAGYLNIGYSALNQTAELIGGEVKMLEGISERITEKLKYRRTRRNRLRYRAPRFDNRRRNDGWLTPSIQHKLDTHHRLIDRIKSVLPIDEVMIEVANFDIQKIKNQEISGDGYQQGEQKGFDNLREYLLHRDGHKCQHPECRNKSKQPILQVHHLGFWKNPPDRTERPGNLITLCNKCHTPAQHKKKGKLFGWEPKIKPFKPETFMSTVRWRLTKDTGYKVTFGHITKAKRRLLKLDKSHHNEAFVIAGGEYQTRCEALNLVQIRRNKRSMEQFYDAKYLDIRDKKSKSGTELFSGRRTRNKNLNSENLRAYRGHKLFKGQRRVKKLRYRYQPHDEVEFEGAVFEVVGMQNQGTGVKLKDYPGIKNKVVKISAVKSVKKRGGICA

SEQ ID NO: 24958 - protein, 433 aa, synthetic construct
MQPHIRAFVLDKDRKPLMPCHAAKARKLLKKGKAAVFRRFPFTIILKERTREASAIQDVLVKVDPGSKSTGLAVVRKDEKNVHHALAFICLNHRGSKIRDALTSRRQLRRGRRSRNLRYRAPRFLNRKKPKGWLAPSLQHRVDAVMSWMNRLTRLVPVAGFVQELVKFDTQLMQNAAISGVEYQQGELAGYELKEYLLEKFDRKCVYCGKSGVVLNVEHIIPKARGGSNRVSNLAIACVQCNQKKGAMPIEDFLKKKPALLAQIRKQLKTTLRDAAAVNATRWSLFRSLQSTGCTVEVGSGAQTKFNRHAFSVPKEHWLDALCTGRIDGVADWEKLRPLQAYCIGRGSHKRTRTDKYGFPLCYFSRRKRPNDFGTGDYVRVKVTRGRNTGIWIGRATLTDGKLSVETKAGRVKATFLNSKCLFKSDGYKYQYL

SEQ ID NO: 24959 - protein, 470 aa, synthetic construct; identical to SEQ ID NO: 24835

SEQ ID NO: 24960 - protein, 422 aa, synthetic construct
MVYVIDIKGRPLMPTERHGKVRRLLRDGLARVVTRTPFTIQLLYETTPFVQPVTLGLDPGSKVAGLSASTKDRELLRVEASLRTDIVGLLSTRRELRRTRRSRMIRHRKARFDNRKKPDSWMAPSIEQRIDSHMKLVNKACTILPVSRIIVETAQFDIQLIKNPDLSGTDYQHGGQEGWKNVREYVLWRDGHRCRSCGGKSKDPVLEVHHIESRKTGGDSPDNLVTLCKACHERYHKGDLQLKLKRAPSLRDAAAVNIFRWEIYNRLVKAYGKDKVSLIYGYKTKDRRISLSLPKTSETDAFCIAGNLDASRCGLVKARFVARHCRSLHRQVTEKGGRRRSTIASHWIGKSYLQRFDTVKYQGKECIISGSTNGRPILRNIDWTKATDSPSVNPKQVKFLCRKHGSIIYETFSNKQIITCET

SEQ ID NO: 24961 - protein, 478 aa, synthetic construct
MTGNCTRSVKGKNKMPVCVLSANGERLMPTENYGKVRHLLKDGRAVIAKRNPFTIQLTCETSTYTQSIEMCVGTGYEHIGVSIKTKAKEVVSQQYDLLTNERSRHDDCRAYRQTRRNHLRYRAARFNNRVSSKKPGWIAPSLDNKVERHLDIISRYLSVMPVTDVFIKAATYDTQLLAALEAGEPVPQGKDYQHGPQYGFDTLREAVFERDHYTCVYCKRGLKDGAILHIHHAYYWKGLHGNSMRELATCCEKCNTPANHKEGGKLWGFDKPLRKYTGEAFMNSVRWILYQRAMARFQGAAEVHMTYGVISKRVRTDLGLPYSCATDAYCMGELRPEARCETEVFQKYRRNNRVLSKFYDAKYYDTREKGVIRSGNELSSGRTNRNHNLDGENLRRFRGCKKSKGRTSTRKQRYAMQPGDIVVYGNRKYVSKGCSSYGRALSLLTDGKPLVVSMKKIQLVRHKGGWVRLPQAAAGAKE

SEQ ID NO: 24962 - protein, 433 aa, unidentified; identical to SEQ ID NO: 24648

SEQ ID NO: 24963 - protein, 453 aa, Lactobacillus sp.; identical to SEQ ID NO: 24548

SEQ ID NO: 24964 - protein, 416 aa, unidentified; identical to SEQ ID NO: 24575

SEQ ID NO: 24965 - protein, 376 aa, synthetic construct
MVYVLDINGHPLMPTERHGKVKHLLKNGKAKVVKRCPFTIQLLYKSLTYTQSIILGVDAGSKHIGLSATTNDKEFYASDVELRTDIVKLISKRRELRRSRRNRKTRYRQARFDNRKRKDGWLAPSISQKIKCHIKVVENVHKILPITNIVVETASFDIQKIKNPNIKDTEYQQGEQLDFWNVREYVLFRDEHICQCCKGKTKDKILNVHHIESRKTGGNAPNNLITLCETCHKGYHNGTVRLPKTIKRGIIFRDAAFMGIMRWAFYNKLREKYKNVSMTYGYITKNTRIENKLPKKHYVDARCISGHPLAKPSEMIYYQKKIRCHNRQLFKINTLKGGTRKRNQSERVIKGYILFDKVKYQGKEYFVFGRRISGFF

SEQ ID NO: 24966 - protein, 483 aa, unidentified; identical to SEQ ID NO: 24807
  source 1..483: note = Chloroflexia sp.

SEQ ID NO: 24967 - protein, 417 aa, synthetic construct; identical to SEQ ID NO: 24686

SEQ ID NO: 24968 - protein, 448 aa, Lactobacillus sp.; identical to SEQ ID NO: 24592

SEQ ID NO: 24969 - protein, 433 aa, synthetic construct
MQSHIRAFVLDKDRKPLMPCHAAKARKLLKKGKAAVFRRFPFTIILKERTREASAIQDVLVKVDPGSKSTGLAVVRKDEKNLHHALAFICLNHRGSKIRDALTSRRQLRRGRRSRNLRYRAPRFLNRKKPKGWLAPSLQHRVDAVMSWMNRLTRLVPVAGFVQELVKFDTQLMQNAAISGVEYQQGELAGYELKEYLLEKFDRKCVYCGKSGVVLNVEHIIPKARGGSNRVSNLAIACTQCNQKKGAMPIEDFLKKKPALLAQIRKQLKTPLRDATAVNATRWALYRNLQATGCTVEVGSGALTKFNRHAFSVPKEHWLDALCAGRIDGVADWENLRPLQAYCIGRGSHKRTRTDKYGFPLCYFSRYKRPNDFGTGDYVRVKVTRGRNTGIWIGRATLTDGKLSVETKAGRVKATFLNSKCLFKSDGYKYQYL

SEQ ID NO: 24970 - protein, 392 aa, Alicyclobacillus sp.; identical to SEQ ID NO: 24863

SEQ ID NO: 24971 - protein, 478 aa, synthetic construct
MTGNCTRSVKGKNKMPVCVLSANGERLMPTENYGKVRHLLKDGRAVIAKRNPFTIQLTYDTSTYTQPIEMCVGTGYEHIGVSIKTKAKEVVSQQYDLLTNERSRHDDCRAYRRTRRNRLRYRAARFNNRVSSKKPGWIAPSLDNKVERHLDIISRYLSVMPVKDVFIKAATYDTQLLAALEAGEPVPQGKDYQHGPQYGHDTLREAVFERDHYTCVYCKRGLKDGAILHVHHAYYWKGLHGNSMRELATCCEKCNTPANHKEGGKLWGFDKPLRKYTGEAFMNSVRWILYQRAMARFQGAAEVHMTYGVISKRVRTDLGLPYSCATDAYCMGELRPEARCETEVFQKYRRNNRVLSKFYDAKYYDTREKGVIRSGNELSSGRTNRNHNLDGENLRRFRGCKKSKGRTSTRKQRYAMQPGDIVVYGNRKYVSKGCSSYGRALSLLTDGKPLMVSTKKIQLVRHKGGWVRLPQAAVGAKE

SEQ ID NO: 24972 - protein, 478 aa, synthetic construct; identical to SEQ ID NO: 24531

SEQ ID NO: 24973 - protein, 336 aa, synthetic construct
MAVCVLSANGERLMPTENYGKVRHLLKDGRAVIAKRNPFTIQLTYDTSTYTQPIEMCVGTGYEHIGVSIKTKAKEVVSQQYDLLTNERSRHDDCRAYRRTRRNRLRYRAARFNNRVSSKKPGWIAPSLDNKVERHLDIISRYLSVMPVKDVFIKAATYDTQLLAALEAGEPVPQGKDYQHGPQYGHDTLREAVFERDHYTCVYCKRGLKDGAILHVHHAYYWKGLHGNSMRELATCCEKCNTPANHKEGGKLWGFDKPLRKYTGEAFMNSVRWILYQRAMARFQGAAEVHMTYGVISKRVRTNLGLPYSCATDAYCMGELRPEARCETEVFQKYRR

SEQ ID NO: 24974 - protein, 478 aa, synthetic construct; identical to SEQ ID NO: 24568

SEQ ID NO: 24975 - protein, 323 aa, synthetic construct
LVQCWYVTLARGTLRQRSILWNRLLPDSRKGKDFFMQPHIRAFVLDKDRKPLMPCHAARARKLLKKGKAAVFRRFPFTIILKERTREASAVQDVLVKIDPGSKSTGIAVVRKDKKDVHHALAFICLNHRGSKIRDALTSRRQLRRGRRSRNLRYRAPRFLNRTKPQGSLAPSLRHRVDTVMSWMNRLTRLVPVTGFVQELVKFDTQLMQNAAISGVEYQQGELAGYELKEYLLEKFDRKCVYCGKSGVVLNVEHIIPKARGGSNRVSNIAIACVQCNQKKGAMPIEDFLKKKPALLAQIRKQLKTTLRDAGAGHAARWALQQR

SEQ ID NO: 24976 - protein, 500 aa, synthetic construct; identical to SEQ ID NO: 24707

SEQ ID NO: 24977 - protein, 464 aa, synthetic construct
MPVCVLSANGERLMPTENYGKVRHLLKDGRAVIAKRNPFTIQLTYDTSTYTQPIELCVGTGYEHIGVSIKTKAKEVVSQQYDLLTNERSRHDDCRAYRRTRRNHLRYRAARFNNRVSGKKPGWIAPSLDNKVERHLDIISRYLSVMPVTDVFIKAATYDTQLLAALEAGEPVPQGKDYQHGPQYGYDTLREAVFERDHYTCVYCKRGLKDGAILHVHHAYYWKGLHGNSMRELATCCEKCNTPANHKEGGKLWGFDKPLRKYTGEAFMNSVRWILYQRAMARFQGAAEVHMTYGVISKRVRTDLGLPYSCATDAYCMGELRPEARCETEAFQKYRRNNRVLSKFYDAKYYDTREKGVIRSGNELSSGRTNRNHNLDGENLRRFRGCKKSKGRTSTRKQRYAMQPGDIVVYGNRKYVSKGCSSYGRALSLLTDGKPLMVSMKKIQLVRHKGGWVRLPQAAAEAKK

SEQ ID NO: 24978 - protein, 478 aa, synthetic construct
MTGNCTRSVKGKNKMPVCVLSANGERLMPTENYGKVRHLLKDGRAVIAKRNPFTIQLTYDTSTYTQPIEMCVGTGYEHIGVSIKTKAKEVVSQQYDMLTNERSRHDDCRAYRRTRRNRLRYRAARFNNRVSGKKPGWIAPSLDNKVERHLDIISRYLSVMPVTDVFIKAATYDTQLLAALEAGEPVPQGKDYQHGPQYGYDTLREAVFERDHYTCVYCKRGLKDGAILHVHHAYYWKGLHGNSMRELATCCEKCNTPANHKEGGKLWGFDKPLRKYTGEAFMNSVRWILYQRAMARFQGVAEVHMTYGVISKRVRTNLGLPYSCATDAYCMGELRPEARCETEVFQKYRRNNRVLSKFYDAKYYDTREKGVIRSGNELSSGRTNRNHNLDGENLRRFRGCKKSKGRTSTRKQRYAMQPGDIVVYGNRKCVSKGCSSYGRALSLLTDGKPLMVSMKKIQLVRHKGGWVRLPHAAAEAKK

SEQ ID NO: 24979 - protein, 417 aa, synthetic construct; identical to SEQ ID NO: 24686

SEQ ID NO: 24980 - protein, 452 aa, unidentified; identical to SEQ ID NO: 24570

SEQ ID NO: 24981 - protein, 478 aa, synthetic construct; identical to SEQ ID NO: 24531

SEQ ID NO: 24982 - protein, 430 aa, synthetic construct
MTGNCTRSVKGKNKMPVCVLSANGERLMPTENYGKVRHLLKDGRAVIAKRNPFTIQLTYDTSTYTQPIEMCVGTGYEHIGVSIKTKAKEVVSQQYDMLTNERSRHDDCRAYRRTRRNRLRYRAARFNNRVSGKKPGWIAPSLDNKVERHLDIISRYLSVMPVTDVFIKAATYDTQLLAALEAGEPVPQGKDYQHGPQYGYDTLREAVFERDHYTCVYCKRGLKDGAILHVHHAYYWKGLHGNSMRELATCCEKCNTPANHKEGGKLWGFDKPLRKYTGEAFMNSVRWILYQRAMARFQGVAEVHMTYGVISKRVRTNLGLPYSCATDAYCMGELRPEARCETEVFQKYRRNNRVLSKFYDAKYYDTREKGVIRSGNELSSGRTNRNHNLDGENLRRFRGCKKSKGLKKIQLVRHKGGWVRLPQAAAGAKE

SEQ ID NO: 24983 - protein, 353 aa, synthetic construct; identical to SEQ ID NO: 24789

SEQ ID NO: 24984 - protein, 464 aa, synthetic construct; identical to SEQ ID NO: 24525

SEQ ID NO: 24985 - protein, 443 aa, synthetic construct
VRHLLKDGRAVIAKRNPFTIQLTYDTSTYTQPIEMCVGTGYEHIGVSIKTKAKEVVSQQYDMLTNERSRHDDCRAYRRTRRNRLRYRAARFNNRVSGKKPGWIAPSLDNKVERHLDIISRYLSVMPVTDVFIKAATYDTQLLAALEAGEPVPQGKDYQHGPQYGYDTLREAVFERDHYTCVYCKRGLKDGAILHVHHAYYWKGLHGNSMRELATCCEKCNTPANHKEGGKLWGFDKPLRKYTGEAFMNSVRWILYQRAMARFQGVAEVHMTYGVISKRVRTNLGLPYSCATDAYCMGELRPEARCETEVFQKYRRNNRVLSKFYDAKYYDTREKGVIRSGNELSSGRTNRNHNLDGENLRRFRGCKKSKGRTSTRKQRYAMQPGDIVVYGNRKYVSKGCSSYGRALSLLTDGKPLMVSMKKIQLVRHKGGWVRLPHAAAEAKK

SEQ ID NO: 24986 - protein, 464 aa, synthetic construct
MPVCVLSANGERLMPTENYGKVRHLLKDGRAVIAKRNPFTIQLTYETSTYTQPIELCVGTGYEHIGVSIKTKAKEVISQQYDLLTNERSRHDDCRAYRRTRRNRLRYRAARFNNRVSGKKPGWIAPSLDNKVERHLDIISRYLSVMPVTDVFIKAATYDTQLLAALEAGEPVPQGKDYQHGPQYGYDTLREAVFERDHYTCVYCKRGLKDGAILHVHHAYYWKGLHGNSMRELATCCEKCNTPANHKEGGKLWGFDKPLRKYTGEAFMNSVRWILYQRAMARFQGVAEVHMTYGVISKRVRTNLGLPYSCATDAYCMGELRPEARCETEVFQKYRRNNRVLSKFYDAKYYDTREKGVIRSGNELSSGRTNRNHNLDGENLRRFRGCKKSKGRTSTRKQRYAMQPGDIVVYGNRKYVSKGCSSYGRALSLLTDGKPLMVSMKKIQLVRHKGGWVRLPHAAAEAKK

SEQ ID NO: 24987 - protein, 478 aa, synthetic construct
MTGNCTRSVKGKNKMPVCVLSANGERLMPTENYGKVRHLLKEGRAVIAKRNPFTIQLTYETSTYTQSIEMCVGTGYEHIGVSIKTKAKEVVSQQYDLLTNERSRHDDCRVHRRTRRNHLRYRAARFNNRVSIRKPGWIAPSLDNKVERHLDIISRYLSVMPVTDVFIKAATYDTQLLAALEAGEPVPQGKDYQHGPQYGHDTLREAVFERDHYTCVYCKRGLKDGAILHVHHAYYWKGLHGNSMRELATCCEKCNTPANHKEGGKLWGFDKPLRKYTGEAFMNSVRWILYQRAMARFQGVAEVHMTYGVISKRVRTNLGLPYSCATDAYCMGELRPEARCETEVFQKYRRNNRVLSKFYDAKYYDTREKGVIRSGNELSSGRTNRNHNLDGENLRRFRGCKKSKGRTSTRKQRYAMQPGDIVVYGNRKYVSKGCSSYGRALSLLTDGKPLMVSMKKIQLVRHKGGWVRLPHAAAEAKK

SEQ ID NO: 24988 - protein, 464 aa, synthetic construct; identical to SEQ ID NO: 24525

SEQ ID NO: 24989 - protein, 443 aa, synthetic construct
MMKVFVLDKDHKPLMPCGPARARKLLKAGRARVHKLQPFTIRIVDRSLADSVVQKVVVKVDPGSKETGIAVVREDEEETHHALYFINLKHRGAAIRDALTSRRQLRRGRRSRNLRYRAPRFLNRSQQKGWLPPSLQHRVDTTLSWVNRLRRLAPVSGIAQELVKFDTQLMQNPDISGVEYQQGELAGYELKEYLLEKFGRRCVYCAKSGVPLNVEHIVPKARGGSNRLSNLAIACVECNQKKGARPIEEFLKEKPELLARIRKRLKTPLRDAASVNATRWALFEALRATGLPIRTGSGALTKFNRHCFGVPKEHWFDALCVGRINGVSYEPGMKVLNVSCTGRGQYKRTRTDKFGFPICHFMRTKRPHGVGLGDLVRMTVQKGKHPGIWTGRAFPSNDGRVVLILPEFRIWGRARNCSILSLSDGYGYRLTDSETTKPTSFGK

SEQ ID NO: 24990 - protein, 453 aa, Lactobacillus sp.; identical to SEQ ID NO: 24539

SEQ ID NO: 24991 - protein, 464 aa, synthetic construct; identical to SEQ ID NO: 24986

SEQ ID NO: 24992 - protein, 478 aa, synthetic construct; identical to SEQ ID NO: 24531

SEQ ID NO: 24993 - protein, 417 aa, synthetic construct; identical to SEQ ID NO: 24686

SEQ ID NO: 24994 - protein, 389 aa, synthetic construct
MAVVGNDREYYASESIRKSEKDRITARRGYWRTRRNRLRYRKPRFDNRRRKAGWLAPSVQHRLEFTVREIQRLYRFLPISQLVVEVSPFDNQKLANPAIKPWEYTQGKMHGYQTVKDYLLVRDHNRDALDGQVYPASQLRVHHLVQHKDGGTNQPDNLVLLSDVHHNQANHVNGTLTKLAANRQRTIDYRGVYFMSLLASRLNHYFPNYVQTQGYLTANLRFRYGITKSHLNDAFVIAGGTDQYTRTGNVYRREKLRCNNRSLQKFYDAKYIDRRDDKKKAGKELSSGRTKRSRELNYDNQRIYRLRKVSKGRISIRRQHYRLRPHDIVFNMKIKQTEFVKGVISNGKSVLLQNGHTVTPQKLVCLHHVNGILTVKVPLVLDDGFISHD

SEQ ID NO: 24995 - protein, 433 aa, synthetic construct; identical to SEQ ID NO: 24888

SEQ ID NO: 24996 - protein, 522 aa, synthetic construct; identical to SEQ ID NO: 24654

SEQ ID NO: 24997 - protein, 478 aa, synthetic construct
MTGNCTRSVKGKNKMPVCVLSANGERLMPTENYGKVRHLLKDGRAVIAKRNPFTIQLTYDTSTYTQPIEMCVGTGYEHIGVSIKTKAKEVVSQQYDMLTNERSRHDDCRAYRRTRRNRLRYRAARFNNRVSGKKPGWIAPSLDNKVERHLDIISRYLSVMPVTDVFIKAATYDTQLLAALEAGEPVPQGKDYQHGPQYGYDTLREAVFERDHYTCVYCKRGLKDGAILHVHHAYYWKGLHGNSMRELATCCEKCNTPANHKEGGKLWGFDKPLRKYTGEAFMNSVRWILYQRAMARFQGVAEVHMTYGVISKRVRTNLGLPYSCATDAYCMGELRPESRCETEVFQKYRRNNRVLSKFYDAKYYDTREKGVIRSGNELSSGRTNRNHNLDGENLRRFRGCKKSKGRISTRKQRYAMQPGDIVVYGNRKYVSKGCSSYGRALSLLTDGKPLMVSMKKIQLVRHKGGWVRLPHAAAEAKK

SEQ ID NO: 24998 - protein, 478 aa, synthetic construct; identical to SEQ ID NO: 24531

SEQ ID NO: 24999 - protein, 464 aa, synthetic construct
MAVCVLSANGERLMPTENYGKVRHLLKDGRAVIAKRNPFTIQLTYDTSTYTQPIEMCVGTGYEHIGVSIKTKAKEVVSQQYDLLTNERSRHDDCRAYRRTRRNRLRYRAARFNNRVSSKKPGWIAPSLDNKVERHLDIISRYLSVMPVKDVFIKAATYDTQLLAALEAGEPVPQGKDYQHGPQYGHDTLREAVFERDHYTCVYCKRGLKDGAILHVHHAYYWKGLHGNSMRELATCCEKCNTPANHKEGGKLWGFDKPLRKYTGEAFMNSVRWILYQRAMARFQGAAEVHMTYGVISKRVRTDLGLPYSCATDAYCMGELRPEARCDTEVFQKYRRNNRVLSKFYDAKYYDTREKGVIRSGNDLSSGRTNRNHNLDGENLRRFRGCKKSKGRTSTRKQRYAMQPGDIVVYGNRKYVSKGCSSYGRALSLLTDGKPLMVSTKKIQLVRHKGGWVRLPQAAVGAKE

SEQ ID NO: 25000 - protein, 478 aa, synthetic construct; identical to SEQ ID NO: 24653

SEQ ID NO: 25001 - protein, 436 aa, unidentified
  source 1..436: note = Methylococcaceae sp.
MNRVFVLGSTKKPLMPCHPARARELLRKGKAAVFRMEPFTIILSGREDGEVQDIEFKASPGGKATGIALVGLFRSGARLLFGAEIAHRGAAVRASLDSRRSLRHGRRGRKTRYRQPRPNFAKRSRRANCGGKWLPPSIKSRVDNAAVWSARLARLAPVACAHVETVRFDTQKLQNPEISGIEYQQGTLAGYEVREYLLEKFKRTCAYCGKQGIPLQIEHIQPIALGGTGRVSNLAIACRPCNEKKAAQPVAQFLADRPDVLKKIKAQAKAPLLSDVAALNAARFALGNEIGASGLDTRRWSHGRTKLNRTAQGYAWGKWADAACVGESGAAVYIPANFRPLSIKATGRGTRQVVRTDKYGFPRGAAGRCKRVQGFQTGDLVRLVQPKGKYAGTHVGRLAGVRADGRFDIRADGQKITSGHQNFSLIQRGDGYEYRH

SEQ ID NO: 25002 - protein, 433 aa, unidentified
MINVFVLDKDHKPLMPCRPARARRLLRAGRARVHKLYPFTIRIVDRTLAESAVQPVRIKLDPGSKETGIAVVREDEKKTHHALYFINLRHRGASIRDALTARRKLRRGRRSRNLRYRAPRFLNRRRPEGWLPPSLQHRVDTTKSWVDRLRRLVPASGLAEELVKFDTQKLQNPEISGTEYQQGELAGYELREYLLEKFGRRCVYCGKSGVPLNVEHIVPKARGGSNRVSNLAIACVECNQKKGARPIEDFLKGKPELLTRIRRQLRTPLRDASAVNATRWALFNALKATGLPVAVGSGALTKLNRRLCGVPKEHWLDALCAGETRGAVFDERMQILEVYCAGRGQYKRTRTARYGFPVAYFMRTKRPHGVGTGDIVRMSVRGGKHPGLWTGRAAAKNSGAVVLQMPEFQIGGRAKNCTILARNDGYGYSLTNS

SEQ ID NO: 25003 - protein, 478 aa, synthetic construct; identical to SEQ ID NO: 24531

SEQ ID NO: 25004 - protein, 500 aa, synthetic construct; identical to SEQ ID NO: 24937

SEQ ID NO: 25005 - protein, 478 aa, synthetic construct; identical to SEQ ID NO: 24701

SEQ ID NO: 25006 - protein, 464 aa, synthetic construct; identical to SEQ ID NO: 24525

SEQ ID NO: 25007 - protein, 478 aa, synthetic construct; identical to SEQ ID NO: 24594

SEQ ID NO: 25008 - protein, 464 aa, synthetic construct; identical to SEQ ID NO: 24525

SEQ ID NO: 25009 - protein, 417 aa, synthetic construct; identical to SEQ ID NO: 24686

SEQ ID NO: 25010 - protein, 478 aa, synthetic construct; identical to SEQ ID NO: 24531

SEQ ID NO: 25011 - protein, 470 aa, synthetic construct
MTGNCTRSVKGKNKMPVCVLSANGERLMPTENYGKVRHLLKDGRAVIAKRNPFTIQLTYDTSTYTQPIEMCVGTGYEHIGVSIKTKAKEVVSQQYDMLTNERSRHDDCRAYRRTRRNRLRYRAARFNNRVSGKKPGWIAPSLDNKVERHLDIISRYLSVMPVTDVFIKAATYDTQLLAALEAGEPVPQGKDYQHGPQYGYDTLREAVFERDHYTCVYCKRGLKDGAILHVHHAYYWKGLHGNSMRELATCCEKCNTPANHKEGGKLWGFDKPLRKYTGEAFMNSVRWILYQRAMARFQGVAEVHMTYGVISKRVRTNLGLPYSCATDAYCMGELRPEARCETEVFQKYRRNNRVLSKFYDAKYYDTREKGVIRSGNELSSGRTNRNHNLDGENLRRFRGCKKSKGRTSTRKQRYAMQPGDIVVYGNRKYVSKGCSSYGRALSLLTDGKPLMVSMKKIQLVRHKGGWVRLP

SEQ ID NO: 25012 - protein, 453 aa, Lactobacillus sp.; identical to SEQ ID NO: 24539

SEQ ID NO: 25013 - protein, 433 aa, synthetic construct; identical to SEQ ID NO: 24672

SEQ ID NO: 25014 - protein, 362 aa, synthetic construct
MPVCVLSANGERLMPTENYGKVRHLLKDGRAVIAKRNPFTIQLTYETSTYTQPIELCVGTGYEHIGVSIKTKAKEVVSQQYDLLTNERSRHDDCRAYRRTRRNRLRYRAARFNNRVSGKKPGWIAPSLDNKVERHLDIISRYLSVMPVTDVFIKAATYDTQLLAALEAGEPVPQGKDYQHGPQYGFDTLREAVFERDHYTCVYCKRGLKDGAILHVHHAYYWKGLHGNSMRELATCCEKCNTPANHKEGGKLWGFDKPLRKYTGEAFMNSVRWILYQRATARFQGAAEVHMTYGVISKRVRTNLGLPYSCATDAYCMGELRPEARCETEVFQKYRRNNRVLSKFYDAKYYDTREKGVVRSGN

SEQ ID NO: 25015 - protein, 547 aa, synthetic construct
RPPPNDRELYRTIKLQSGLVDVPHQMTGSYTENMERIIGVSVDVPHQMTGSYTAAPPQTEHHAVDVPHRMTGNCTRSVKGKNKMPVCVLSANGERLMPTENYGKVRHLLKDGRAVIAKRNPFTIQLTYDTSTYTQPIEMCVGTGYEHIGVSIKTKAKEVVSQQYDMLTNERSRHDDCRAYRRTRRNRLRYRAARFNNRVSGKKPGWIAPSLDNKVERHLDIISRYLSVMPVTDVFIKAATYDTQLLAALEAGEPVPQGKDYQHGPQYGYDTLREAVFERDHYTCVYCKRGLKDGAILHVHHAYYWKGLHGNSMRELATCCEKCNTPANHKEGGKLWGFDKPLRKYTGEAFMNSVRWILYQRAMARFQGVAEVHMTYGVISKRVRTNLGLPYSCATDAYCMGELRPEARCETEVFQKYRRNNRVLSKFYDAKYYDTREKGVIRSGNELSSGRTNRNHNLDGENLRRFRGCKKSKGRTSTRKQRYAMQPGDIVVYGNRKYVSKGCSSYGRALSLLTDGKPLMVSMKKIQLVRHKGGWVRLPHAAAEAKK

SEQ ID NO: 25016 - protein, 430 aa, synthetic construct; identical to SEQ ID NO: 24982

SEQ ID NO: 25017 - protein, 401 aa, synthetic construct
MTGNCTRSVKGKNKMPVCVLSANGERLMPTENYGKVRHLLKDGRAVIAKRNPFTIQLTYDTSTYTQPIEMCVGTGYEHIGVSIKTKAKEVVSQQYDMLTNERSRHDDCRAYRRTRRNRLRYRAARFNNRVSGKKPGWIAPSLDNKVERHLDIISRYLSVMPVTDVFIKAATYDTQLLAALEAGEPVPQGKDYQHGPQYGYDTLREAVFERDHYTCVYCKRGLKDGAILHVHHAYYWKGLHGNSMRELATCCEKCNTPANHKEGGKLWGFDKPLRKYTGEAFMNSVRWILYQRAMARFQGVAEVHMTYGVISKRVRTNLGLPYSCATDAYCMGELRPEARCETEVFQKYRRNNRVLSKFYDAKYYDTREKGVIRSGNELSSGRTNRNHNLDGENLRRFRGCK

SEQ ID NO: 25018 - protein, 527 aa, synthetic construct
MLPQSPALESTSADKPGVGTKRGVDARSQIRATGVQHGRGETSQTVTSDEKHHSARTASAGQAEDRGLATPYNIVVPNIAVPKRTAQHVFVLDKHGQPLQPCRPARARKLLADGRARVHRLVPFVIRLVDREVADSQVLGVEVGIAPGSKVTGVSVFTNNQGGREGLVSIEIGHRGQQIHKKMQQRANYRRRRRSANLRYRAPRFNNRTRPSGWLAPSLRHRVDSTMAMVARLRRWAPVTAIHQELVRFDMQKMQNPEISGVEYQQGELFGYEVREYLLEKWERKCAYCGATHTPLNIDHIRPRSSGGSNRVSNLTLACIPCNQSKSSNPVEEFLVNKPEVLKKILARAKAPLKDAAAVNSTRWALYQALKGSGLPVLVGSGGRTKWNRSRFGLAKSHTLDALCVGEVDAVAAVPKTILVAECMGRGSYSRTRTDKYGFPRLYLPRTKQVHGFATGDLVRAVIPKGKHAGVHVGRVAVRSRGWFRVGTVDCSWQHCTLLQRADGYEYERREEVPFPSRLQAGVPTAP

SEQ ID NO: 25019 - protein, 460 aa, synthetic construct; identical to SEQ ID NO: 24549

SEQ ID NO: 25020 - protein, 478 aa, synthetic construct; identical to SEQ ID NO: 24531

SEQ ID NO: 25021 - protein, 453 aa, Lactobacillus sp.; identical to SEQ ID NO: 24539

SEQ ID NO: 25022 - protein, 464 aa, synthetic construct
MMPTQKQKQVNYVYVVDANGTPVMPTSRLGMVRRWLKSGQAVWYGNSRTTIQFVRPIDTQTQPLTLGVNTGFHLGMAVVGNDREYYASESIRKSEKDRITARREYRRTRRNRLRYRKPRFDNRRRKAGWLAPSVQHRLEFTVREIQRLYRFLPISQLVVEVSPFDNQKLANPAIKPWEYTQGKMHGYQTVKDYLLVRDHNRDALDGQVYPASQLRVHHLAQHKDGGTNQPDNLVLLSDVHHNQANHVNGTLTKLAANRQRTIDYRGVYFMSLLASRLNHYFPNYVQTQGYLTANLRFRYGITKSHLNDAFVIAGGTDQYTRTGNVYRREKLRCNNRSLQKFYDAKYIDRRDDKKKAGKELSSGRTKRSRELNYDNQRIYRLRKVSKGRISIRRQHYRLRPHDIVFNMKIKQTEFVKGVISNGKSVLLQNGHTVTPQKLVCLHHVNGILTVKVPLVLDDGLISHD

SEQ ID NO: 25023 - protein, 464 aa, synthetic construct; identical to SEQ ID NO: 24793

SEQ ID NO: 25024 - protein, 464 aa, synthetic construct; identical to SEQ ID NO: 24576

SEQ ID NO: 25025 - protein, 478 aa, synthetic construct; identical to SEQ ID NO: 24701

SEQ ID NO: 25026 - protein, 551 aa, unidentified
  source 1..551: note = Bacterium sp.
MLVHVLNKDGKALMPCHPAKARILLRERKAKPVKGKTGYFTIQLLYGSSGYKQDIVVGIDTGAKRVPIAAVGNSRVYYAKEKILRTDVKKQLSDRARYRRTRRSRKTRYRKPRFLNRVKTKCARCGVNNVPKRWKKVKRKRGKSLKKVCNGRAQLCRPCQGKKGQPLAEGVGERSEHNKPHILAPSVFNRAESILNDVHKLSQTLPISRIVVEIASFDTQKMASALIEGVEYQHGTLFGYEIKQYLLTVHKHKCAYCGGLSGDNVLQVEHIHPQSKGGTDKVSNLTISCRVCNEAKGSLTLDQWERVLRSSPSEIEEKRLKNIPAIKKQSKLKKGFQYSALTQSYKNYLLSELVSILGFDTLPHFVPNPQPALLNPSRKDFVVEVTFGAKTKYHRNQLGLPKSQINDAFVIASEGKSFRMPKLYILEKQVKKRYPHDYISPHKKGQPIVKSKREPEIFGFRLWDKVKCKHSKNGEVVGYIQGRRSSGSFAIASLDGDLLIGGITYKKLTKLRKAESNYIRERIRQLFLSDFPNQTGYPCRKTVKNVYQKTF

SEQ ID NO: 25027 - protein, 385 aa, synthetic construct
QYDMLTNERSRHDDCRAYRRTRRNRLRYRAARFNNRVSGKKPGWIAPSLDNKVERHLDIISRYLSVMPVTDVFIKAATYDTQLLAALEAGEPVPQGKDYQHGPQYGYDTLREAVFERDHYTCVYCKRGLKDGAILHVHHAYYWKGLHGNSMRELATCCEKCNTPANHKEGGKLWGFDKPLRKYTGEAFMNSVRWILYQRAMARFQGVAEVHMTYGVISKRVRTNLGLPYSCATDAYCMGELRPEARCETEVFQKYRRNNRVLSKFYDAKYYDTREKGVIRSGNELSSGRTNRNHNLDGENLRRFRGCKKSKGRTSTRKQRYAMQPGDIVVYGNRKYVSKGCSSYGRALSLLTDGKPLMVSMKKIQLVRHKGGWVRLPHAAAEAKK

SEQ ID NO: 25028 - protein, 464 aa, synthetic construct; identical to SEQ ID NO: 24525

SEQ ID NO: 25029 - protein, 416 aa, unidentified; identical to SEQ ID NO: 24575

SEQ ID NO: 25030 - protein, 433 aa, synthetic construct
MQPHIRAFVLDKDRKPLMPCHAAKARKLLKKGKAAVFRRFPFTIILKERTREASAIQDVLVKVDPGSKSTGLAVVRKDEKNLHHALAFICLNHRGSKIRDALTSRRQLRRGRRSRNLRYRAPRFLNRTKPQGSLAPSLRHRVDTVMSWMNRLTRLVPVTGFVQELVKFDTQLMQNAAISGVEYQQGELAGYELKEYLLEKFDRKCVYCGKSGVVLNVEHIIPKARGGSNRVSNIAIACVQCNQKKGAMPIEDFLKKKPALLAQIRKQLKTPLRDATAVNATRWALYRNLQATGCTVEVGSGALTKFNRHAFSVPKEHWLDALCAGRIDGVADWEKLRPLQAYCIGRGSHKRTRTDKYGFPLCYFSRRKRPNDFGTGDYVRVKVTRGRNAGIWTGRATLTDGKLSVETKAGRVKATFLNSKCLFKSDGYKYQYL

SEQ ID NO: 25031 - protein, 491 aa, unidentified; identical to SEQ ID NO: 24890
  source 1..491: note = Chloroflexales sp.

SEQ ID NO: 25032 - protein, 478 aa, synthetic construct; identical to SEQ ID NO: 24531

SEQ ID NO: 25033 - protein, 402 aa, Lactobacillus sp.
MMPTQKQKQVNYVYVVDANGTPVMPTSRLGMVRRWLKSGQAVWYGNSRTTIQFVRPIDTQTQPLTLGVNTGFHLGMAVVGNDREYYASESIRKSEKDRITARREYRRTRRNRLRYRKPRFDNRRRKAGWLAPSVQHRLEFTVREIQRLYRFLPISQLVVEVSPFDNQKLANPAIKPWEYTQGKMHGYQTVKDYLLVRDHNRDALDGQVYPASQLRVHHLVQHKDGGTNQPDNLVLLSDVHHNQANHVNGTLTKLAANRQRTIDYRGVYFMSLLASRLNHYFPNYVQTQGYLTANLRFRYGITKSHLNDAFVIAGGTDQYTRTGNVYRREKLRCNNRSLQKFYDAKYIDRRDDKKKAGKELSSGRTKRSRELNYDNQRIYRLRKVSKGRISIRRQHYRLRPHD

SEQ ID NO: 25034 - protein, 478 aa, synthetic construct; identical to SEQ ID NO: 24531

SEQ ID NO: 25035 - protein, 453 aa, Lactobacillus sp.; identical to SEQ ID NO: 24539

SEQ ID NO: 25036 - protein, 430 aa, unidentified
  source 1..430: note = Candidate division MSBL1 archaeon
MSQKVYVRNMRGEPLMPTNPAKARHLLDDDRAEVVKRKPFTIRLKYPTGENGQEVTLGVDAGYSTVGFSAVTEDEELIRGELDLRDDVSDRLRRRADYRRNRRSRKTRYREPRFDNRGKEDGWLAPSIKYKMSDHLQLVEMIGELLPVTRTVIEVATFDTEKLANPELDGTEYVPETFRGYEVKEYLLAKWGRRCVYCGAEDVPLEVDHIVPKSRGGSDRVDNLTISCVDCNREKGDRTAEEYGYPEVQRKAGESLKETAFMNIVRWKIVNKLDCDHTYGYRTKERRIDLGLEKSDDNDAFVIAGGGDQKRTGPYRVTRGRRNNRKLEINRRGHGRSVRRERYEFQPGDLVRGDDALYRVRGSCSYGRYVRAFDEERNEEYLRADSLKLVKYGKGLCWREKTSRNSSPTESEDSKGVSSRQPDGMAERLR

SEQ ID NO: 25037 - protein, 478 aa, synthetic construct; identical to SEQ ID NO: 24531

SEQ ID NO: 25038 - protein, 500 aa, synthetic construct
MTGSYTAAPPQTEHHAVDVPHRMTGNCTRSVKGKNKMPVCVLSANGERLMPTENYGKVRHLLKDGRAVIAKRNPFTIQLTYDTSTYTQPIEMCIGTGYEHIGVSIKTKAKEVVSQQYDMLTNERSRHDDCRAYRRPRRNRLRYRAARFNNRVSGKKPGWIAPSLDNKVERHLDIISRYLSVMPVTDVFIKAATYDTQLLAALEAGEPVPQGKDYQHGPQYGYDTLREAVFERDHYTCVYCKRGLKDGAILHVHHAYYWKGLHGNSMRELATCCEKCNTPANHKEGGKLWGFDKPLRKYTGEAFMNSVRWILYQRAMARFQGVAEVHMTYGVISKRVRTNLGLPYSCATDAYCMGELRPEARCETEVFQKYRRNNRVLSKFYDAKYYDTREKGVIRSGNELSSGRTNRNHNLDGENLRRFRGCKKSKGRTSTRKQRYAMQPGDIVVYGNRKYVSKGCSSYGRALSLLTDGKPLMVSMKKIQLVRHKGGWVRLPHAAAEAKK

SEQ ID NO: 25039 - protein, 463 aa, synthetic construct
MMPTQKQKQVNYVYVVDANGTPVMPTSRLGMVRRWLKSGQAVWYGNSRTTIQFVRPIDTQTQPLTLGVNTGFHLGMAVVGNDREYYASESIRKSEKDRITARREYWRTRRNRLRYRKPRFDNRRRKAGCSRRPFSIGSSLRFARFNACTGSCRSVSWSSRLVPSTTKNLPIPPSSRGNTRKEKCTAIKQLRIIYWSAIITVMPWMVKSTRLAATGAPPRSAQRRWHESADNLVLLSDVHHNQANHVNGTLTKLAANRQRTIDYRGVYFMSLLASRLNHYFPNYVQTQGYLTANLRFRYGITKSHLNDAFVIAGGTDQYTRTGNVYRREKLRCNNRSLQKFYDAKYIDRRDDKKKAGKELSSGRTKRSRELNYDNQRIYRLRKVSKGRISIRRQHYRLRPHDIVFNMKIKQTEFVKGVISNGKSVLLQNGHTVTPQKLVCLHHVNGILTVKVPLVLDDGFISHD

SEQ ID NO: 25040 - protein, 464 aa, synthetic construct
MPVCVLSANGERLMPTENYGKVRHLLKDGRAVIAKRNPFTIQLTYDTSTYTQPIELCVGTGYEHIGVSIKTKAKEVVSQQYDLLTNERSRHDDCRAYRRTRRNHLRYRAARFNNRVSGKKPGWIAPSLDNKVERHLDIISRYLSVMPVTDVFIKAATYDTQLLAALEAGEPVPQGKDYQHGPQYGYDTLREAVFERDHYTCVYCKRGLKDGAILHVHHAYYWKGLHGNSMRELATCCEKCNTPANHKEGGKLWGFDKPLRKYTGEAFMNSVRWILYQRAMARFQGAAEVHMTYGVISKRVRTDLGLPYSCATDAYCMGELRPEARCETEAFQKYRRNNRVLSKFYDAKYYDTREKGVIRSGNELSSGRTNRNHNLDGENLRRFRGCKKSKGRTSTRKQRYAMQPGDIVVYGNRKYVSKGCSSYGRALSLLTDGKPLMVSMKKIQLVRHKGGWVRLPHAAAEAKK

SEQ ID NO: 25041 - protein, 464 aa, synthetic construct; identical to SEQ ID NO: 24525

SEQ ID NO: 25042 - protein, 478 aa, synthetic construct; identical to SEQ ID NO: 24738

SEQ ID NO: 25043 - protein, 362 aa, synthetic construct
LARGTLRQRSILWNRLLPDSRKGKDFFMQPHIRAFVLDKDRKPLMPCHAARARKLLKKGKAAVFRRFPFTIILKERTREASAVQDVLVKIDPGSKSTGIAVVRKDKKDVHHALAFICLNHRGSKIRDALTSRRQLRRGRRSRNLRYRAPRFLNRTKPQGSLAPSLRHRVDTVMSWMNRLTRLVPVTGFVQELVKFDTQLMQNAAISGVEYQQGELAGYELKEYLLEKFDRKCVYCGKSGVVLNVEHIIPKARGGSNRVSNLAIACVQCNQKKGAMPIEDFLKKKPALLAQIRKQLKTTLRDAAPSMRRVGHSLGAFSQRDAPSKSAPAHRPSSIVTLSACRKSIGSMHYAPVASTAWPIGKN

SEQ ID NO: 25044 - protein, 477 aa, synthetic construct
MTGSYTRLREEKKMAVCVLSANGERLMPTENYGKVRHLLKEGRAVIAKRNPFTIQLTYETSTYTQSIEMCVGTGYEHIGVSIKTKAKEVVSQQYDLLTNERSRHDDCRVHRRTRRNHLRYRAARFNNRVSIRKPGWIAPSLDNKVERHLDIISRYLSVMPVTDVFIKAATYDTQLLAALEAGEPVPQGKDYQHGPQYGHDTLREAVFERDHYTCVYCKRGLKDGAILHVHHAYYWKGLHGNSMRELATCCEKCNTPANHKEGGKLWGFDKPLRKYTGEAFMNSVRWILYQRAMAHFQGAADIHMTYGVISKRVRTDLGLPYSCATDAYCMGELRPEARCETEVFQKYRRNNRVLSKFYDAKYYDTREKGVIRSGNELSSGRTNRNHNLDGENLRRFRGCKKSKGRTSTRKQRYALQPGDVVVFGNRKYVSKGCSSYGRELKLLTDGKPLVVSTKKIQLVRHKGGWVRLPQAAAGAKE

SEQ ID NO: 25045 - protein, 522 aa, synthetic construct; identical to SEQ ID NO: 24654

SEQ ID NO: 25046 - protein, 489 aa, synthetic construct
MTGSYTAAPPQTEHHAVDVPHRMTGNCTRSVKGKNKMPVCVLSANGERLMPTENYGKVRHLLKDGRAVIAKRNPFTIQLTYDTSTYTQPIEMCVGTGYEHIGVSIKTKAKEVVSQQYDMLTNERSRHDDCRAYRRTRRNRLRYRAARFNNRVSGKKPGWIAPSLDNKVERHLDIISRYLSVMPVTDVFIKAATYDTQLLAALEAGEPVPQGKDYQHGPQYGYDTLREAVFERDHYTCVYCKRGLKDGAILHVHHAYYWKGLHGNSMRELATCCEKCNTPANHKEGGKLWGFDKPLRKYTGEAFMNSVRWILYQRAMARFQGVAEVHMTYGVISKRVRTNLGLPYSCATDAYCMGELRPEARCETEVFQKYRRNNRVLSKFYDAKYYDTREKGVIRSGNELSSGRTNRNHNLDGENLRRFRGCKKSKGRTSTRKQRYAMQPGDIVVYGNRKYVSKGCSSYGRALSLLTDGKPLMVSMKKIQLVRHKGGWV

SEQ ID NO: 25047 - protein, 478 aa, synthetic construct; identical to SEQ ID NO: 24531

SEQ ID NO: 25048 - protein, 478 aa, synthetic construct; identical to SEQ ID NO: 24531

SEQ ID NO: 25049 - protein, 443 aa, synthetic construct
MMKVFVLDKDHKPLMPCGPARARKLLKAGRARVHKLQPFTIRIVDRSLADSVVQKVVVKVDPGSKETGIAVVREDEEETHHALYFINFKHRGAAIRDALTSRRQLRRGRRSRNLRYRAPRFLNRSKPKGWLPPSLQHRVDTTLSWVNRLRRLAPVSGIAQELVKFDTQLMQNPDISGVEYQQGELAGYELKEYLLEKFGRRCVYCAKSDVPLNVEYIVPKARGGSNRLSNLAIACVECNQKKGAKPIEEFLKGKPELLARVRKQLKTPLRDAASVNATRWALFHALSATGLPVRTGSGALTKYNRHCFGVPKEHWFDALCVGRINGVSYDSCMKVLNVSCTGRGQYKRTRTDKFGFPICHFMRTKRPHGVGLGDLVRMTVQKGKHPGIWTGRAFPSNDGRVVLILPEFRIWGRARNCSILSLSDGYGYRLTDSETTKPTSFGK

SEQ ID NO: 25050 - protein, 478 aa, synthetic construct; identical to SEQ ID NO: 24594

SEQ ID NO: 25051 - protein, 478 aa, synthetic construct; identical to SEQ ID NO: 24812

SEQ ID NO: 25052 - protein, 608 aa, Streptomyces sp.; identical to SEQ ID NO: 24669

SEQ ID NO: 25053 - protein, 417 aa, synthetic construct; identical to SEQ ID NO: 24686

SEQ ID NO: 25054 - protein, 522 aa, synthetic construct
MTGSYTAAPPQTEHHAVDVPHQMTGSYTVKRRKRFPTVVDIPHRMTGNCTRSVKGKNKMPVCVLSANGERLMPTENYGKVRHLLKDGRAVIAKRNPFTIQLTYDTSTYTQPIEMCVGTGYEHIGVSIKTKAKEVVSQQYDLLTNERSRHDDCRAYRRTRRNRLRYRAARFNNRVSSKKPGWIAPSLDNKVERHLDIISRYLSVMPVTDVFIKAATYDTQLLAALEAGEPVPQGKDYQHGPQYGYDTLREAVFERDHYTCVYCKRGLKDGAILHVHHAYYWKGLHGNSMRELATCCEKCNTPANHKEGGKLWGFDKPLRKYTGEAFMNSVRWILYQRAMARFQGVAEVHMTYGVISKRVRTNLGLPYSCATDAYCMGELRPEARCETEVFQKYRRNNRVLSKFYDAKYYDTREKGVIRSGNELSSGRTNRNHNLDGENLRRFRGCKKSKGRTSTRKQRYAMQPGDIVVYGNRKYVSKGCSSYGKALSLLTDGKPLMVSMKKIQLVRHKGGWVRLPHAAAEAKK

SEQ ID NO: 25055 - protein, 417 aa, synthetic construct
MVYVLDINGHPLMPTERHGKVKHLLKNGKAKVVKRCPFTIQLLYKSLTYTQSIILGVDAGSKHIGLSATTNDKEFYASDVELRTDIVKLISKRRELRRSRRNRKTRYRQARFDNRKRKDGWLAPSISQKIKCHIKVVENVHKILPITNIVVETASFDIQKIKNPNIKDTEYQQGEQLDFWNVREYVLFRDEHICQCCKGKTKDKILNVHHIESRKTGGNAPNNLITLCETCHKGYHNGTVRLPKTIKRGIIFRDAAFMGIMRWAFYNKLREKYKNVSMTYGYITKNTRIENKLPKKHYVDARCISGHPLAKPFEMIYYQKKIRCHNRQLFKINTLKGGTRKRNQSERVIKGYILFDKVKYQGKEYFVFGRRISGFFDIRELNGNKVNKGSINCKKLKLIERCSGYLIELRKETVLLS

SEQ ID NO: 25056 - protein, 500 aa, synthetic construct; identical to SEQ ID NO: 24937

SEQ ID NO: 25057 - protein, 501 aa, synthetic construct; identical to SEQ ID NO: 24556

SEQ ID NO: 25058 - protein, 367 aa, Beggiatoa sp.
MVYVIDIHGNPLMPTQRLGKVRRWLKQGQAIVVGHSPFTIKLLFETGNCVQSLTLGIDTGYKTVGISVVSSKQELLSTEIQLRIDVSEKLTEKRMYRRNRRNRLRYRQPRFLNRKKAISLAPSVLHKINSHLRIIKWVKSLLPIAKIVMEMGNFDPHKLKNPEIKGIEYQQGEQWGYENVKAYILARDGHRCYFYQANQGNCSEKLHVHHLIYRSNGGTDAPSNLITLCEKHHALVHKNRLKLARVQFKSLKSATIMNIVNNPLCHKLPTAQTTFGYMTKVMRTQLSLAKSRIHDAYVIAGGNDQQRLSPLQLLFKRKNNRSLQRLFKGNKRSLRTQRYPIQPNDIIEYDGKIYPSEGTHCKDSRGR

SEQ ID NO: 25059 - protein, 478 aa, synthetic construct; identical to SEQ ID NO: 24531

SEQ ID NO: 25060 - protein, 460 aa, synthetic construct; identical to SEQ ID NO: 24549

SEQ ID NO: 25061 - protein, 478 aa, synthetic construct; identical to SEQ ID NO: 24531

SEQ ID NO: 25062 - protein, 391 aa, Sutterella sp.; identical to SEQ ID NO: 24697

SEQ ID NO: 25063 - protein, 413 aa, synthetic construct
MVYVIDKQGNPLMPMERYGKVRRMLKSGQARVYSRTPFVIQLCYDIKEPKCQEVVLGVDAGHKELALSGCSSAQELYAAKVMLRTDVPKLMEAKKNFKRRRKINRRYRAKRSQNRKRNSEHGWAAPSVKVKVDEIIQAILRVKQILPVTEVRMEIAEFNYPQIRQYIYDGIAIPHELDLYDVRQYMLWNSYHTCESCKGREDTKKLIVVGQEAKDMVVLCANCYLRYEAGKKKLPKPKMRKSPADIPEFGMVRKYLRRRIYSAIDPSEIVEVYGYQTKIRREKFKLPYSKLNNAFAIAASTESQSSSDKVYCYKILRRHNRMLHNATVLKGGTRKLHQAPYIVKGFRLWDKVLFENQECFVAGRRKTGYFLLKDIKGNIVHTAASYKRIRLLEMSKGYIVAEYSRKESMFGAE

SEQ ID NO: 25064 - protein, 413 aa, synthetic construct
MVYVIDKQGNPLMPMERYGKVRRMLKNGQARVYSRTPFVIQLCYDIKEPKCQEVVLGVDAGHKELALSGCSSAQELYAAKVMLRTDVSKLMEAKKNFKRRRKINRRYRAKRSQNRKRNSEYGWAAPSVKVKVDEIIQAILRVKQILPVTEVRMEIAEFNYPQIRQYIYDGIAIPHELDLYDVRQYMLWNSYHTCESCKGREDTKKLIVVGQEAKDMVVLCANCYLRYEAGKKKLPKPKMRKSPADIPEFGMVRKYLRRRIYSAIDPSEIVEVYGYQTKIRREKFKLPYSKLNNAFAIAASTESQSSSDKVYCYKILRRHNRMLHNATVLKGGTRKLHQAPYIVKGFRLWDKVLFENQECFVAGRRKTGYFLLKDIKGNIVHTAASYKRIRLLEMSKGYIVAEYSRKESMFGAE

SEQ ID NO: 25065 - protein, 428 aa, unidentified
MAVFVLDRRGRPLMPCSEKRARLMLERQRARVHRLMPFVIRLTDRLIEESTLQPVRIKIESGSKITGLALVREDGESTAVLNLFELIHRGRQISEGLSSRSNFRRRRRSANLRYRAPHYANPARTNGWLPPSLRHRIDTTKSWVRRFIRWAPVSGLASELVRYDLAAVEGDERVSDNQEHAEIAAQEIRAYLLDKWGHQCVYCDSDRQHVQIDPIDLRTAGEPARDISGLILACTSCIARRAGRDISEFVTDRARLERLRNWTKAPQRDRAAVDGARSAIAQFLATTGLPVELASGGRTKWNRTRFALPKSQALDAVCVGAVTAVVCWRIPVIKIKCTGRGRYQRTLVNAHGFPRAHLMRNKRIHNVQTGDRVRATVPTGKKAGIHTGRVAVRSRGYFDVHKPDGPVTGIHHRYCVVLQRADGYSYSM

SEQ ID NO: 25066 - protein, 561 aa, Roseburia sp.
VALFDASSRKPCKADTESKKTVFPAMHRLIPDAPPPFGSVTLHGNHPKEKFSLQEQAYIYVIGLDGRPQMPTRRHRHVKKLLNTGKARIVEHVPYTIQLLYENSPVLQPLQLTENPGRTNIGIAVLTEQGKLVFSASAETRNKEIHKLMEKRKQHRQNSRAGERKARQRLARKHGTTLKEGHLDRKLPYYKEEKPVTCKDIRNTEARYCNRKRKSGWLTPTVEQLVRTHLNLVHKVQRFLPITDIALEINRFAFALLDDPSATGIDFQTGPLKGYDDIHAAVSDQQHGVCLLCGKEIEAFTYIVPKAKGGSETLANVAGVCNCCLEKLHTDQNVREELKQQKEGQFKKYGALSAINQAIPYICEQLIREYGSSHVQFCTGGETYHMRELLGYTKEQAMTAPAIDAYVIGLVSLGIIPEEKPDFTFSHQIRQFRRQDRRIIKSQRERTYKYHGTTVAKNRNSRFQQTSPSLADWYQEMCLTYGTTQAEKMRSQLTVVKSTRRYNNPNRLYPGTVFYYRGERHVMSGQLSNGLYLRAVGDSKTNYKAKECWVAKRNAGLVFVE

SEQ ID NO: 25067 - protein, 503 aa, unidentified
MLPQSRTLEEGDHAGKRQSAKGSLLPRRWAAGRAHSRGERARNANQAPSPEITGKGSVSSHVFVLDKRKRPLMPCLPVRAKRLLSLGRAGVHRVYPFTIRLKFRTSGNTQPVQLKLDPGSRTTGLALLREDGIRQHVFWMVELEYRGEAIRASLTQRRAFRRHRSSANLQYQPPRFNNRARPEGWIAPSSRLRVDTTMSWVNRLGRLAPITGLSVELVRFDTLAMQNPEISGVEYQQGTLAGYELREYLLEKWGREGVYCGARNVPLEIDYIHPKSLEGSDRVSNLTLACQECNQAKGNQPVEKFLSGQPERLDRILAKARATLWDAVVVNSTRWALFHRVKETGLSVNAGTSGRTKWNRSRLSIPKAYCLDAVCVGGLESAEGWNRTFLKIKASGRGSYQRTWLNQHGFSRGYLMRRKVSFGFQTGEIARVVVPMGKKAGTYVGRIAIRASGSFKVQTADGVVQGVPHRFYRLLHRNDGYGYSHWTLTLPSLKGRGISRGVL

SEQ ID NO: 25068 - protein, 503 aa, unidentified; identical to SEQ ID NO: 25067

SEQ ID NO: 25069 - protein, 525 aa, unidentified
MEQMTMQRSNYVSARWQQTHSGMLPQSRTLEEGDHAGKRQSAKGSLLPRRWAAGRAHSRGERARNANQAPSPEITGKGSVSSHVFVLDKRKRPLMPCLPVRAKRLLSLGRAGVHRVYPFTIRLKFRTSGNTQPVQLKLDPGSRTTGLALLREDGIRQHVFWMVELEYRGEAIRASLTQRRAFRRHRSSANLQYQPPRFNNRARPEGWIAPSSRLRVDTTMSWVNRLGRLAPITGLSVELVRFDTLAMQNPEISGVEYQQGTLAGYELREYLLEKWGREGVYCGARNVPLEIDYIHPKSLEGSDRVSNLTLACQECNQAKGNQPVEKFLSGQPERLDRILAKARATLWDAVVVNSTRWALFHRVKETGLSVNAGTSGRTKWNRSRLSIPKAYCLDAVCVGGLESAEGWNRTFLKIKASGRGSYQRTWLNQHGFSRGYLMRRKVSFGFQTGEIARVVVPMGKKAGTYVGRIAIRASGSFKVQTADGVVQGVPHRFYRLLHRNDGYGYSHWTLTLPSLKGRGISRGVL

SEQ ID NO: 25070 - protein, 477 aa, synthetic construct
VTSDDNIVEAYFTGGCGFYRGQHLIASLKANQMSKVFVVDKERRPLAPCTPRRARLLLSECKASVLRQYPFTIILKESHATATPRPFRLKIYPASKTTGLAVINESTAEVVWAAELKHRGHLIKKALESRRSLRSGRRSRKTRYRPARWLNRVRKPPVFTNTEGVVVTGKWLPPSLQHRIEVVMTWVERLQHYLQITALSQEVMRFDTQKLQNLEISGVEYQQGTLHGYEVREYLLEKWSRKCAYCGARDTRLEISHLIARSRGGSDQVSNLTLACKACRDQKGASNLEEFLATKPKILKKLQSQARVSLKDVAAINSTRLALLERLKATGLPVEVSSGGETKYNRNQQQIPKSHWLDAVCVGASTPENLEWQQVNPLAIKAMGHGKRQMVNVDAFGFPRGKPKGIPVHPFRTGDIVRVTIPKGKYAGEYEERISSIKTSETRVGIPNKKEKGTIYLQTKYITAKIFSSDGYDYDYL

SEQ ID NO: 25071 - protein, 413 aa, synthetic construct; identical to SEQ ID NO: 25064

SEQ ID NO: 25072 - protein, 413 aa, synthetic construct
MVYVIDKQGNPLMPMERYGKVRRMLKNGQARVYSRTPFVIQLCYDIKEPKCQEVVLGVDAGHKELALSGCSSAQELYAAKVMLRTDVSKLMEAKKNFKRRRKINRRYRAKRSQNRKRNSEHGWAAPSVKVKVDEIIQAILRVKQILPVTEVRMEIAEFNYPQIRQYIYDGIAIPHELDLYDVRQYMLWNSYHTCESCKGREDTKKLIVVGQEAKDMVVLCANCYLRYEAGKKKLPKPKMRKSPADIPEFGMVRKYLRRRIYSAIDPSEIVEVYGYQTKIRREKFKLPYSKLNNAFAIAASTESQSSSDKVYCYKILRRHNRMLHNATVLKGGTRKLHQAPYIVKGFRLWDKVLFENQECFVAGRRKTGYFLLKDIKGNIVHTAASYKRIRLLEMSKGYIVAEYSRKESMFGAE

SEQ ID NO: 25073 - protein, 457 aa, unidentified; identical to SEQ ID NO: 2054
  REGION 1..457: note = Ga0099850_1002913

SEQ ID NO: 25074 - protein, 414 aa, synthetic construct
VVATDALPAKAERGVSHKLSQENSVFVVGRNEEPLMPCHPARARRLLANGRTRIHRLHPFTIRLTDRTTGAVQPTFVKMDPGSKVTGIAIVRQGVGVQHVLHLSELTHRGASVRKHVSQRAMFRRRRRSANFRYRAPRFNNRTRRNGWLPPSLMRLIDNIQSWITRFLLIVPVTGFVQKLVRFDMQAMTNPDIQGVEYQRGTLAGHELREYLLEKWRRKCAYCDAENVPLQVERIHPKARGGSDRVTNLTLACRCCNEAKGSQPVETFLAKKPGLLKCILAQAKQPLSDTAAANSTRWELWRRLSATGLPVQTGSGGRTKWNRSRFDVPKSHCLDAVCAGTVETVAGWNRQPLTIKATGRGSYQRARLDAYGFPRGFLMWRKLVHGFQTGDLVRAIVPTGKKAGPYTGRAPCGR

SEQ ID NO: 25075 - protein, 413 aa, synthetic construct; identical to SEQ ID NO: 2427

SEQ ID NO: 25076 - protein, 525 aa, unidentified; identical to SEQ ID NO: 25069

SEQ ID NO: 25077 - protein, 560 aa, Streptomyces sp.
VTTFQVSEKTHQAVLPQRPALESAAADTPGSRDETGDGRSTRKGGAAGLEHGRGEMRESDLRALARHSEAVASASAEGENAADNGSAMQNVGSGAAFVAVLDRRGVPLMPCHPARARELLAKGRAVVARHTPFVIRLKDREVKESAVPGVAVRIDPGSKGTGIAVTVDVHATSGEDGAGFTTRRGLVAIELRYRGAQIHKAMSQRAAYRRARRSRNLRYRAPRFDNRSRSAGWLGPSVQHRVDTTGSTVRQLIRYVPVSELHVERVSFDTHAMSQGRGWLEASEYQQGTLAGYEARQYLLEKWGRKCAYCGIGDVPLQVEHVQPRAYGGSDRLSNLTLACAPCDAAKGKQSVTEFLSHRPAALKRILAQIKTPLRDAAVMNATRWRIVDQLRSTHLPVYSWSGGRTQYNRVSHGLAKTHTLYALAVGAVKGGTRIVRFPERVLVATAAGRGTYARTRSDRHGFPRLSLPRTKQCFGYATGDLVRAVIPSGKYAGSWTGRVAVRSTGRFNIRSSRGTAQGIHQRYIHLLQRADGYGYITREEEDAHRCADGVGMRVDRSDD

SEQ ID NO: 25078 - protein, 455 aa, unidentified
  source 1..455: note = uncultured SAR324 cluster bacterium
MSRVLVVDANRCPLAPCTPRRARLLLNSGKAAVLRLYPFTIILKQSYPTASPRPVRLKIDPGSKTTGIAVVTEATGEVVWAAELQHRGQLIKDALESRRSLRRGRRNRKTRYRPARWLNRKRTGPPVLTSANAVIQLGKWLAPSLQHRIEVIMTWVQRLRRYLPITAISQEIVRFDMQKMQNPEISGVEYQQGTLYGYEVREYLLEKWHRQCGYCGAKDKRLEVDHIVPRSHGGSNRVSNLTLSCEPCNKKKNQRPVAVFLAKKPDVLQKLQRQAKASLKDAAAVNSTRYALLERLKATGLPVEIASGGRTKFNRFERQIPKTHWLDAACVGASTPEVLRWEAVTPLAIKAMGHGKRQMVGTNKYGFPKGQPKCKPAHTYSTGDFVSAVVPKGMYAGTYTPRRIVKLSEEKRVRIKNDSGQVFPFQAQYVTARVFTADGYDYGFLKAPQSRVLAN

SEQ ID NO: 25079 - protein, 414 aa, synthetic construct; identical to SEQ ID NO: 25074

SEQ ID NO: 25080 - protein, 413 aa, synthetic construct; identical to SEQ ID NO: 25072

SEQ ID NO: 25081 - protein, 413 aa, synthetic construct; identical to SEQ ID NO: 25064

SEQ ID NO: 25082 - protein, 414 aa, synthetic construct; identical to SEQ ID NO: 25074

SEQ ID NO: 25083 - protein, 561 aa, synthetic construct
VALFDDSSRKPCKADTKSKKTVLSAMHRLIPDASPPLGSVRLHGNHTKEKLPLQEQTYIYVIGLDGRPQMPTRRHRHVKKLLNTGKARIVEHVPYTIQLLYENSPVLQPLQLTENPGRTNIGIAVLTEQGKLVFSASAETRNKEIHKLMEKRKQHRQNSRAGERKARQRLARKHGTTLKEGHLDRKLPYYKEEKPVTCKDIRNTEARYCNRKRKSGWLTPTVEQLVRTHLNLVHKVQRFLPITDIALEINRFAFALLDDPSATGIDFQTGPLKGYDDIHAAVSDQQHGVCLLCGKEIEAFTYIVPKAKGGSETLANVAGVCNCCLEKLHTDQNVREELKQLKEGQLKKYGALSAINQAIPYICERLIRECGSTHVQFCTGGETYHMRELLGYTKEQAMTAPAIDAYVIGLVSLGIIPEEKPDFTFSHQIRQFRRQDRSIIKSQRERTYKYHGATVAKNRNSRFQQTSPSLADWYQEMCLTYGTTQAEKMRSQLTVVKSTRRYNNPNRLYPGTVFYYRGERHVMSGQLSNGAYLRAVGDAKTNYKVKDCQIEKQNTGLVFVR

SEQ ID NO: 25084 - protein, 503 aa, unidentified; identical to SEQ ID NO: 25067
  source 1..503: note = SAR324 cluster bacterium JCVI-SC AAA005

SEQ ID NO: 25085 - protein, 413 aa, synthetic construct
MVYVIDKQGNPLMPMERYGKVRRMLKNGQARVYSRTPFVIQLCYDIKEPKCQEVVLGVDAGHKELALSGCSSAQELYAAKVMLRTDVSKLMEAKKNFKRRRKINRRYRAKRSQNRKRNSEHGWAAPSVKVKVDEIIQAILRVKQILPVTEVRMEIAEFNYPQIRQYIYDGIAIPHELDLYDVRQYMLWNSYHTCESCKGREDTKKLIVVGQEAKDMVVLCANCYLRYEAGKKKLPKPKMRKSPADIPEFGMVRKYLRRRIYSAIDPSEIVEVYGYQTKIRREKFKLPYSKLNNAFAIAASTETQSSSDKVYCYKILRRHNRMLHNATVLKGGTRKLHQAPYIVKGFRLWDKVLFENQECFVAGRRKTGYFLLKDIKGNIVHTAASYKRIRLLEMSKGYIVAEYSRKESMFGAE

SEQ ID NO: 25086 - protein, 443 aa, synthetic construct
VWLYQAVYNLGEGFLPSSEERTAFYWLLIYRKEHGIMQYVYVLNKHGEPLMPCSPGKARLLLKQQKACVVKRTPFTIKLLYGSAGYKQPITLGVDAGSKHVGLSASTEKRELYREEFTPRNDVVDLLSTRRQNRRSRRNRKTRYRAPRFDNRVHSKHKGWLAPSVEVKIQEHITVIKRICRILPITLVRVETAPTLYGGSMRMFIAIHSSSKLKLGSPLMQPSAIRFATARFFSMASIRRSTLRLSRSKDAATFSFSAALIFASPFMAPANAFLHFSRNDAGRLLFLFAFDFIAAPSHCFLLSPIIPYTTMNGQISAAKKRPPFLVTSELKSLCHRFATALPCFSRAHHNHLSPRIFSYSFWMSENSIRLLFCPLLSLPKPLSLTSQSKAILRSAILAWSLHSGKGFSSSGPQVMFRIPYSHLPGLMMNSLSMSVSRSSTPGK

SEQ ID NO: 25087 - protein, 413 aa, synthetic construct; identical to SEQ ID NO: 25063

SEQ ID NO: 25088 - protein, 526 aa, unidentified
MLPQSAASEFASADNLRGKDETGSDRRGNPATVVQHGRGETREIGRNPLKAERSGRDGDRSVAALQITALRVFVLDKHGNPLIPCSPARARKLLKSKRARVHRLAPFVIRLADSEVTQSEVPGVEIGIDPGPKATGISVFRDSSDGRVGLVAIELQHRGQYIHNKLQQRASYRRGRRSRNLRYRSLRFNNRTKSKGWLAPSLRHRVDSTMSIVSRLPKWAPVTGIHQELVRFDLQKMQNSEISGVEYQQGTLQGYEVREYLLEKWQRKCAYCGAADVPLNIDHIQPKIMRGSNRVSNLTLACIPCNQSKDNLDLKPWLASRFAPTEAEATAKWVLALSKAPLKDEAAVNSTRWALYHALRATGLSISVGTGGQTKWNRSRFGLTKSHSLDAICVARCHLRRSSQRCGCLPIERHHLQGDRARDILSHHLRQVGISTSSTSAYQVHTRVSDRRSSASGSSIGQEDGYSRWRSSCAKFWQFQHHNEGRNHAGNQSSPLHAIAACRWLGIRAAKGGRACGPSGTIPPHG

SEQ ID NO: 25089 - protein, 525 aa, unidentified; identical to SEQ ID NO: 25069

SEQ ID NO: 25090 - protein, 548 aa, unidentified
MSTLHVSKKTNQEMLPQLPALESTLADKPEVGTKWGAETADNAVVGVQHRRVETGSGLTCLSQRHSSKSEQSDRGEDRSLAASLVSAQRVLAADKHGNPLIPCHPARARKLLQSGRARVHHLAPFVIHLVDREAGNSVVDGVEVGIDPGSKATGISVFWSSEAGRVGLSSLMLQYRGQFIHKKMQQRVSCRRGRRSRNLRYRAPRFNNRTDSKGWLAPGLRHWMDFSMSAVTKLAKWSPATTIPQELVRFDTQKMENPKISGVEYQSGELAGYEIREYLLAKSNRTCAYCGATDVPLNVDRIHPKSRNGSNHVSNVTRACIPCNQSKDAIELSTWLASRFPYNADAIVKRVLWHAKSPLKDAAAVNPTRWALCRALQATGSPVCTGTGGQTKWNRHQFRSSKSHSLIAICVGQVNRVVPYPSRVIITKTTGRGTHSRTSSAKSGFPRLSPPRTKPVQGFQTGDLVLAVVLTDKKAGIHLGRVAVRKSGSCDISTVSHTVQGIGYCRCVLLQRSDGEYEQREEVGPTARVGLSLLTAEAEGFSSHTHFR

SEQ ID NO: 25091 - protein, 413 aa, Clostridium sp.; identical to SEQ ID NO: 2427

SEQ ID NO: 25092 - protein, 428 aa, Burkholderia sp.
MAVFVLDRRGRPLMPCSEKRARLMLERRRARVHRVMPFVIRLTDRLLEESRLQPVRIKIEPGSKITGLALVREDGESTAVLNLFELIHRGRQISEGLSARSNFRRRRRSANLRYRAPHYANPARTSGWLPPSLRHRVDTTKSWVTRFIRWAPVSGLANELVRYDLAAAESDESAPDNEEHAEIAAHEIRAYLLDKWGRQCVYCDSDRQHLQIDPIDLRTAGEPARHISGLILACTSCIARRAGRDIGEFVTDRARLVRLRNWTNAPQRDRAAVDGTRSAIAQFLATTGLPVDLSSGGRTKWNRTRLALPKSPALDAVCVGAVTAVVGWRIPVIKIKCTGRGRYQRTLVNAYGFPRAYLMRNKRIHNVQTGDRVRATVPTGKKAGIHTGRVAVRSRGYFDVHKPDGPVTGIHHRYCVVLQRADGYSYSM

SEQ ID NO: 25093 - protein, 413 aa, unidentified; identical to SEQ ID NO: 2427

SEQ ID NO: 25094 - protein, 413 aa, synthetic construct; identical to SEQ ID NO: 25063

SEQ ID NO: 25095 - protein, 525 aa, unidentified; identical to SEQ ID NO: 25069

SEQ ID NO: 25096 - protein, 454 aa, unidentified
PEITGKGSVSSHVFVLDKRKRPLMPCLPVRAKRLLSLGRAGVHRVYPFTIRLKFRTSGNTQPVQLKLDPGSRTTGLALLREDGIRQHVFWMVELEYRGEAIRASLTQRRAFRRHRSSANLQYQPPRFNNRARPEGWIAPSSRLRVDTTMSWVNRLGRLAPITGLSVELVRFDTLAMQNPEISGVEYQQGTLAGYELREYLLEKWGREGVYCGARNVPLEIDYIHPKSLEGSDRVSNLTLACQECNQAKGNQPVEKFLSGQPERLDRILAKARATLWDAVVVNSTRWALFHRVKETGLSVNAGTSGRTKWNRSRLSIPKAYCLDAVCVGGLESAEGWNRTFLKIKASGRGSYQRTWLNQHGFSRGYLMRRKVSFGFQTGEIARVVVPMGKKAGTYVGRIAIRASGSFKVQTADGVVQGVPHRFYRLLHRNDGYGYSHWTLTLPSLKGRGISRGVL

SEQ ID NO: 25097 - protein, 560 aa, Streptomyces sp.; identical to SEQ ID NO: 25077

SEQ ID NO: 25098 - protein, 457 aa, unidentified
  REGION 1..457: note = Ga0129342_1006080
MSRVLVVDADRCPLAPCTPRRARLLLNSGKAAVLRRYPFTIILKQSYPTASPRPVRLKLDPGSKTTGIAVVTEATGEVVWAAELQHRGQLIKNALESRRSLRRGRRNRKTRYRPARWLNRKRTGPPVLSSADTVSTLGKWLAPSLQHRIEVIMTWVHRLRRYLPITAISQEIVRFDMQKMQNPEISGVEYQQGTLFGYEVREYLLDKWQRQCGYCGAKDKRLEVDHIVPRSHGGSDRVSNLTLSCEPCNKRKNQRPAAVFLAKKPEVLQKLQRQAKAPLKDAAAVNSTRYALLERLKATGLPVEIASGGRTKFNRSERQIPKTHWLDAACVGASTPEVLQWKAVKPLAIKAMGHGKRQVVNVDAYGFPRGKAKGIPVHPFRTGDIVRAEIPKGKYVGTYVSRIAETTTSKPLAGFKSKTGKRIQCHTKHMTKLFNSDGYGYGFLKAPEPRQTVISES

SEQ ID NO: 25099 - protein, 526 aa, unidentified; identical to SEQ ID NO: 25088

SEQ ID NO: 25100 - protein, 525 aa, unidentified; identical to SEQ ID NO: 25069

SEQ ID NO: 25101 - protein, 340 aa, unidentified
  source 1..340: note = uncultured SAR324 cluster bacterium
MSRVFVVDKERRPLAPCTPRRARLLLSDCKASVLRRYPFTIILQESHATATPRPLRLKIYPASKTTGLAVINESTAEVIWAAEIKHRSQQIKKALDSRRSLRSGRRYRKTRYRPARWLNRKRNSPVFVDAEGIAVKGKWLPPSLQHRVEVIMTWVNRLQRYLPITAISQEMMRFDTQKLQNLEINGVEYQQGTLHGYEVREYLLEKWSRECAYCGAREIRLEINHIVPRSHGGSDRVSNLTLACRSCRERRGATNLVEFLSTKPKLLKKIQSQAKAPLKDVAAINSTRLALLERLRATGLPVEVSSGGETKFNRNQQRIPRSHWLNAACIGASTPNNVKW

SEQ ID NO: 25102 - protein, 486 aa, unidentified
  source 1..486: note = SAR324 cluster bacterium JCVI-SC AAA005
VLSARGVTSDDNIVEAYFTGGCGFYRGQHLIASLKANQMSKVFVVDKERRPLAPCTPRRARLLLSECKASVLRQYPFTIILKESHATATPRPLRLKIYPASKTTGLAVINESTAEVVWAAELKHRGHLIKKALESRRSLRRGRRSRKTRYRPARWLNRVRKPPVLTNTEGVVVTGKWLPPSLQHRIKVVMTWVERLQHYLQITALSQEVMRFDTQKLQNPEISGVWYQQGTLHGYEVREYLLEKWSRKCAYCGARDTRLEISHLIARSRGGSDQVSNLTLACKACRDQKGDSNLEKFLATKPKILKKLQSQARVSLKDVAAINSTRLALLERLKATGLPVEVSSGGETKYNRNQQQIPKSHWLDAVCVGASTPENLEWQQVNPLAIKAMGHGKRQMVNVDAFGFPRGKPKGIPVHPFRTGDIVRVTIPKGKYAGEYEERISSIKTSETRVGIPNKKEKGTIYLQTKYITAKIFSSDGYEYYFYPNK

SEQ ID NO: 25103 - protein, 486 aa, unidentified
  source 1..486: note = SAR324 cluster bacterium
VLSARGVTSDDNIVEAYFTGGCGFFRGQHLIASLKANQMSKVFVVDKERRPLAPCTPRRARLLLSECKASVLRQYPFTIILKESHATATPRPFRLKIYPASKTTGLAVINESTAEVVWAAELKHRGHLIKKALESRRSLRRGRRSRKTRYRPARWLNRVRKPPVFTNTEGVVVTGKWLPPSLQHRIEVVMTWVERLQHYLQITAISQEVMRFDTQKLQNPEISGVEYQQGTLHGYEVREHLLEKWSRKCAYCGARDTRLEISHLIARSRGGSDQVSNLTLACKACRDQKGDSNLEKFLATKPKILKKLQSQARVSLKDVAAINSTRLALLERLKATGLPVEVSSGGETKYNRNQQQIPKSHWLDAVCVGASTPENLEWQQVKPLAIKAMGHGKRQMVNVDAFGFPRGKPKGIPVHPFRTGDIVRVTIPKGKYAGEYEERVSSIKTSETRVGIPNKKEKGTIYLQTKYITAKIFSSDGYEYYFYPNK

SEQ ID NO: 25104 - protein, 414 aa, synthetic construct; identical to SEQ ID NO: 25074

SEQ ID NO: 25105 - protein, 269 aa, synthetic construct
MVYVIDKQGNPLMPMERYGKVRRMLKSGQARVYSRTPFVIQLCYDIKEPKCQEVVLGVDAGHKELALSGCSSARELYAAKVMLRTDVSKLMEAKKNFKRRRKINRRYRAKRSQNRKRNSEHGWAAPSVKVKVDEIIQAILRVKQILPVTEVRMEIAEFNYPQIRQYIYDGIAIPHELDLYDVRQYMLWNSYHTCESCKGREDTKKLIVVGQEAKDMVVLCANCYLRYEAGKKKLPKPKMRKSPADIPEFGMVRKYLRRRIQHISGEDLC

SEQ ID NO: 25106 - protein, 431 aa, unidentified
MPCLPVRAKRLLSLGRAGVHRVYPFTIRLKFRTSGNTQPVQLKLDPGSRTTGLALLREDGIRQHVFWMVELEYRGEAIRASLTQRRAFRRHRSSANLQYQPPRFNNRARPEGWIAPSSRLRVDTTMSWVNRLGRLAPITGLSVELVRFDTLAMQNPEISGVEYQQGTLAGYELREYLLEKWGREGVYCGARNVPLEIDYIHPKSLEGSDRVSNLTLACQECNQAKGNQPVEKFLSGQPERLDRILAKARATLWDAVVVNSTRWALFHRVKETGLSVNAGTSGRTKWNRSRLSIPKAYCLDAVCVGGLESAEGWNRTFLKIKASGRGSYQRTWLNQHGFSRGYLMRRKVSFGFQTGEIARVVVPMGKKAGTYVGRIAIRASGSFKVQTADGVVQGVPHRFYRLLHRNDGYGYSHWTLTLPSLKGRGISRGVL

SEQ ID NO: 25107 - protein, 428 aa, Burkholderia sp.; identical to SEQ ID NO: 25092

SEQ ID NO: 25108 - protein, 413 aa, synthetic construct; identical to SEQ ID NO: 2427

SEQ ID NO: 25109 - protein, 354 aa, synthetic construct
MVYVIDKQGNPLMPMERYGKVRRMLKSGQARVYSRTPFVIQLCYDIKEPKCQEVVLGVDAGHKELALSGCSSAQELYAAKVMLRTDVPKLMEAKKNFKRRRKINRRYRAKRSQNRKRNSEHGWAAPSVKVKVDEIIQAILRVKQILPVTEVRMEIAEFNYPQIRQYIYDGIAIPHELDLYDVRQYMLWNSYHTCESCKGREDTKKLIVVGQEAKDMVVLCANCYLRYEAGKKKLPKPKMRKSPADIPEFGMVRKYLRRRIYSAIDPSEIVEVYGYQTKIRREKFKLPYSKLNNAFAIAASTESQSSSDKVYCYKILRRHNRMLHNATVLKGGTRKLHQAPYIVKGFRLWDKVLF

SEQ ID NO: 25110 - protein, 503 aa, unidentified; identical to SEQ ID NO: 25067

SEQ ID NO: 25111 - protein, 454 aa, unidentified; identical to SEQ ID NO: 25096

SEQ ID NO: 25112 - protein, 431 aa, unidentified; identical to SEQ ID NO: 25106

SEQ ID NO: 25113 - protein, 532 aa, unidentified
  source 1..532: note = Acidimicrobiaceae sp.
MLPQSAALEFASADNLRGKDETGSERRGNPVTVVQHGRGETREIGRNSAEPDLSSEAEDRSLTAPQITASRVFVLDKHGNPLMPCSSARARKLLKSKRARVHRLAPFVIRLVDREVTQSEVPGVEVGIDPGSKATGISVFRDSPDGRVGLVAIELQHRGQYIHKKLQQRSGYRRGRRSRNLRYRAPRFNNRAKPKGWLAPSLQHRVDSTMSIVSRLRQWAPVTGIHQELVRFDMQQMQNPEISGVEYQQGELAGYEVREYLLAKWNRTCAYCGATDVPLNIDHIQPKIKGGSNRVSNLTLACILCNQSKDAIELSTWLTSRFAPTEAEDIAKRVLARAKSPLRDAAAVNSTRWALYSALQATGLPVSVGTGGQTKWNRSRFRLAKSHTLDALCVGQVNGVVAHPSNVIISKATGRGTYSRTVSDKSGFPRLMRPRIKCIQGFQTGDLVQTVVPSGKKMGTHVGRVAVRSSGSFNITTKGKTMQGISHRHCTLLQRGDGWGYEQRKEVGPVARVGLSLPTAKAGGFSSHTHSR

SEQ ID NO: 25114 - protein, 413 aa, synthetic construct
MVYVIDKQGNPLMPMERYGKVRRMLKSGQARVYSRTPFVIQLCYDIKEPKCQEVVLGVDAGHKELALSDCSSAQELYAAKVMLRTEVPKLMEAKKNFKRRRKINRRYRAKRSQNRKRNSEHGWAAPSVKVKVDEIIQAILRVKQILPVTEVRMEIAEFNYPQIRQYIYDGIAIPHELDLYDVRQYMLWNSYHTCESCKGREDTKKLIVVGQEAKDMVVLCANCYLRYEAGKKKLPKPKMRKSPADIPEFGMVRKYLRRRIYSAIDPSEIVEVYGYQTKIRREKFKLPYSKLNNAFAIAASTESQSSSDKVYCYKILRRHNRMLHNATVLKGGIRKLHQAPYIVKGFRLWDKVLFENQECFVAGRRRTGYFLLKDIKGNIVHTAASYKRIRLLEMSKGYIVAEYSRKESMFEAE

SEQ ID NO: 25115 - protein, 413 aa, synthetic construct; identical to SEQ ID NO: 25063

SEQ ID NO: 25116 - protein, 336 aa, synthetic construct
MVYVIDKQGNPLMPMERYGKVRRMLKNGQARVYSRTPFVIQLCYDIKEPKCQEVVLGVDAGHKELALSGCSSAQELYAAKVMLRTDVSKLMEAKKNFKRRRKINRRYRAKRSQNRKRNSEYGWAAPSVKVKVDEIIQAILRVKQILPVTEVRMEIAEFNYPQIRQYIYDGIAIPHELDLYDVRQYMLWNSYHTCESCKGREDTKKLIVVGQEAKDMVVLCANCYLRYEAGKKKLPKPKMRKSPADIPEFGMVRKYLRRRIYSAIDPSEIVEVYGYQTKIRREKFKLPYSKLNNAFAIAASTESQSSSDKAKEVSRDRNEDSCLCFDVEEKYVSTIS

SEQ ID NO: 25117 - protein, 233 aa, synthetic construct
MVYVIDKQGNPLMPMERYGKVRRMLKSGQARVYSRTPFVIQLCYDIKEPKCQEVVLGVDAGHKELALSGCSSARELYAAKVMLRTDVSKLMEAKKNFKRRRKINRRYRAKRSQNRKRNSEHGWAAPSVKVKVDEIIQAILRVKQILPVTEVRMEIAEFNYPQIRQYIYDGIAIPHELDLYDVRQYMLWNSYHTCESCKGREDTKKLIVVGQEAKDMVVLCANCYLRYKGIYCF

SEQ ID NO: 25118 - protein, 483 aa, unidentified
  VARIANT 222: note = X can be any naturally occurring amino acid
  source 1..483: note = Flavobacteriaceae sp.
VLSARGVTSDDNIVEAYFTGGCSFLGGQHLIASLKANQMSKVFVVDKERRPLAPCTPRRARLLLSECKASVLRQYPFTIILKESHATATPRPLRLKIYPASKTTGLAVINESTAEVVWAAELKHRGHLIKKALESRRSLRRGRRSRKTRYRPARWLNRVRKPPVFTNSEGVVVTGKWLPPSLQHRIEVVMTWVERLQHYLQITAISQEVMRFDTQKLQNPEXSGVEYQQGTLHGYEVREYLLEKWSRKCAYCGARDTRLEISHLIARSRGGSDQVSNLTLACKACRDQKGDSNLEKFLATKPKILKKLQSQARVSLKDVAAINSTRLALLERLKATGLPVEVSSGGETKYNRNQQQIPKSHWLDAVCVGASTPENLEWQQVNPLAIKAMGHGKRQMVNVDAFGFPRGKPKGIPVHPFRTGDIVRVTIPKGKYAGEYEERISSIKTSETRVGIPNKKEKGTIYLQTKYITAKIFSSDGYDYDYL

SEQ ID NO: 25119 - protein, 495 aa, unidentified
  source 1..495: note = Streptosporangium sp.
MEHGRGEIGSGGTRLDRRHPEGASASEGADREVHPAVFVLDAHGQSLDPCHPARARRLLAAGRAVVARHTPFVIRLKDRTVADSAIQGVQVSIDPGSKHTGIAIFTEYGGSRTGVYSVQLDHRGAQIRDKLTSRAALRRGRRSRNLRYRAPRFNNRTRPKGWLAPSLRHRVDTTMSWVSRLTRWAPVTAIHVEKVAFDTHALSAGHPLEGSQYQQGTLAGYEVREYLLEKWGRTCAYCGAQNVPLNIDHLHPRSRGGSDRISNLVLACIPCNQAKNATPIEEFLKSRPALLAKIFKRAKASLRDAAAVNATRWALWRALDATGLSVTTASGGRTKWNRSRTGAPKSHTLDALHVGDLETVTAWPSMVLVVKATGRGTYCRTRTDAYGFPRLRLPRIKQVKGFTTGDLVRANVPNGKKAGVHTGRVAVRSTGRFNITTRHGTVQGIGHRHIRLLQRADGYGYTTQSDARTIPCFLPALKDRVSTLEVIDDTSGISP

SEQ ID NO: 25120 - protein, 289 aa, unidentified
  source 1..289: note = Ktedonobacterales sp.
VFIFILNCHHQLLMPCSPRKARLLLKGKKAKIVSMEPFTLQLLSGSSGYKQEVSLGIDAGTHTIGLSATTEKQVLFEAEAKLRTDIQELLATRRQFRRARRNRKTGYRQARFQNRKKPQGWLPPSVQHRLDAHLKVIRLVHRILPVSKTTIEVAQFDLQKIQHPEIEGPGYQHGPQQGFWNVREYVLWRDGHQCQWCQGRSKDAVLNVHHIESRKTGGDRPENLITVCKTCHALLHRTHQEQKITRKSNGFRDATQMGVLRWKIYEQVKALFPHVHLIYGYRTSATRLA

SEQ ID NO: 25121 - protein, 428 aa, unidentified
  source 1..428: note = Ktedonobacterales sp.
MSVFVLDTNKTPLAPCHEDRARRLLKSGKAALYRRFPFTIILKRAVENPHVPDLRVRLDPGSKTTGIAVVDDQSGQVVFAAELSHRAHTIKGSLDDRRAVRRSRRNRKTRYRKARWQNRKRKEGWLPPSLESRIANILTWIARLRKFSHITSISLELVSFDMQLMQNPEISGVEYQQGTLAGYETREYLLQKWGRKCAYCSKENIPLQIEHIVPRAKGGSNRVSNLCLSCEKCNLAKGSRSIEDYLKKKPELLKKILAQAKTPLKDAAAVNATRWELFRRLQGFALPIECGSGGLTKFNRTTRELSKTHWLDAACVGKSTPEVLVTFGVQPLLIKACGHGCRQMCLPDKYGFPRTSAKGAKSVKGFQTGDIVRAIITSGQKGGTYVGRVAVRSTGSFNVTTGEGTVQGISYKYCKALHRMDGYSYHLG

SEQ ID NO: 25122 - protein, 431 aa, synthetic construct
MVYVLDINGQPLMPTARHGKVRRLLNIHLAKVVKRCPFTIQLLYPNTKETQPVSLGVDAGSKHIGLAATTEKKVIYQEELIPRNDVVKLLSARRTLRRSRRSRKTRYRKPRFNNRVHSKHKGWLAPSVEVKIQEHITAIKNVCKILPVSEIHVETAEFDLQRLKAMEEGKPLPVGTDYQLGEQYDFYNTRQYVLHRDGYTCQCCDAHDKDVKLHVHHIESRQTGGNAPNNLVTLCEHCHKALHEGKIELPKNKKRGKSHRDAAFMGIMRNTLLERLKKEVDVPATMTYGYITKYWREKAGLEKSHINDAICISKHPYAKPLDAYYLTKAVRHHNRQIHKANFSKGGIRKRNQAPYLVKGFRLFDKVSYQSKEYFIFGRRATGFFDIRTLDGTKVNKGSVSYKKLRIQDTAKAYVKEVRAIPHMNEFTCVLA

SEQ ID NO: 25123 - protein, 427 aa, Fischerella sp.
  source 1..427: note = strain NIES-4106
VSKVFVIDSEKRPLDPIHSAQARQLLRNKKAVFFRRFPFTLILKESRSDAPVQRLRLKIDPGAKHTGLALVNDSSGEVVFAAELKHRGFAIRDSLTSRRQLRRSRRNRKTRYRQPRFLNRTRPEGWLAPSLQSRVENIKTWVNKLRKLVSISAISQELVRFDMQLMRNRDIQGKEYQQGTLAGYETREYLLEKWNRQCAYCGVKDIALQIEHIHPRAKGGSNSITNLTLSCSKCNTKKGTKDIKEFLKKEPIRLEKILKQACIPLADAAAVNTTRFALLKILKATGLPVETGSGGLTKFNRNQQNLEKSHWLDAACVGSSTPILNIKGVKPLLITGNGHGTRQSCRTDKFGFPNRHCSRTKFHFGFQTGDIVKAAVTSGKKVGEYVGRIATRATGSFNISTKDGLVQGISHKFCKRIHAKDGYSYAT

SEQ ID NO: 25124 - protein, 554 aa, Streptomyces sp.
MTTFPAGEQTHRAVLPQQPALESASADTPGSRDETAHGHPAAGRGTGREHGRGETGGQGTAARRRHAEKAATAADEAENGNGDVPRSRPAYAGGSGASRVFVLSRDGQPLMPCHPARARELLRRGRAVVVRQAPFVIRLRDRALAESQVDGVELRIDPGSKGTGLVLTDEKRARATAGEDTAGTVRRGLISAELRHRGDRIRRSMRQRAAHRRRRRSANCRYRAPRRDNRARPPGWLPPSSRHRVDTTFSLAARMCRWAPVQEIHVEHVAFDTHSMSAGRRLAAAEHRHGALAGTGARALLHARWNGACAYCDTTSGPLNIDHVRPRSRGGSHRVSNLVLACVPCNTAKGSMPVELFLAHRPDRLAAVLEQTRAPLHDAAAMNATRRRLVEALTGLGPPVHTWPGGLTRGNRDAMGLGKTHTIDALCVGPLDQGCGGAIVRVPERVLVVEALGRGSYARTTPDRHGFPRLRRSRTKRHFGYVTGDLVRATVPSGKRAGTWTGRISVRARGQHSLVTPAGRFDVSCGNLRLLQRGDGYGWGARSEPVPSAPEKTG

SEQ ID NO: 25125 - protein, 426 aa, Fischerella sp.
  source 1..426: note = strain NIES-4106
LSKVFVIDAEKRPLDSVHPAQARQLLRNKKAAVYRRFPFTIILKESRPDAPVQPLRLKIDPGAKTTGMGLVNDATGEVVFAAELKHRGFAIREALTSRRQLRRSRRNRKIRYRQPRFNNRTRPKGWLPPSLQSRIENIKTWVERLRKLALIKAITQELVRFDMQLMRNPEVCGKEYQQGTLAGYETREYLLEKWKRQCTYCGVKDVPLQIEHIHPRAKGGTNSITNLTLSCTKCNTKKGTKDIKEFLKKDPSRLEKILEHLLRPLADAAAVNTTRFTLLEVLKSTELPVETGSGGLTKFNRNQQNLEKTHWIDAACVGKSTPILNMKGVKPLLIIANGHGTRQSCRTDKFGFPNRHCSRTKFHFGFQTGDIVKAVVTSGKKAGEYVGRIATRATGSFNISTSSELVQGISHKYCKHIHKKDGYSYA

SEQ ID NO: 25126 - protein, 427 aa, Fischerella sp.
  source 1..427: note = strain NIES-4106
LSKVFVIDLEKRPLDPVHPAQARQLLRNKKAAVFRRFPFTLILKDSRPDAPVQALRLKIDPGAKHTGIALVNDSTGEVVFAAELKHRGFAIRDALTSRRQLRGSRRNRKTRYRQPRFLNRTRPEGWLAPSLQSRIENIKTCVERLCKFAPIKAISQELVRFDMQLMRNPEIQGKEYQQGTLAGYETREYLLEKCDRQCAYCGVKDVPLQIEHIHPRAKGGSNSITNLTLSCSKCNTKKGTKDIKDFLKKDPLRLQKILKQACIPLADAAVVNTTRFALFEVLKSTGLPVETGSGGLTKFNRSQQNLEKSHWLDAACVGKSTPILDIKSVKPLLITANGHGTRQSCRTDKFGFPNRHCSRTKFHFGFQTGDIVKAVVTSGKKVGEYAGRIATRASGSFNISTKNGLVQGVSYKYCKHIHKKDGYSYAT

SEQ ID NO: 25127 - protein, 427 aa, Fischerella sp.
  source 1..427: note = strain NIES-4106
MSKVFVIDLEKRPLDPVHPAQARQLLRNKKAAVFRRFPFTIILKDSQAYAPVQPIRLKIDPGAKHTGIAFVNDSTGEVVFAAELKHRGFAIRDALTSRRQLRRTRRNRKTRYRKPRFLNRTRSKGWLAPSLQSRVENIKTWVKRLRKLAPITAISQELVRFDMHLMRNPNIQGKEYQQGTLAGYETREYLLEKWGRQCAYCGVKDVPLQIEHIHPRAKGGSNSITNLTLSCSKCNTKKGSKDIKEFLKKDQTRLEKILKQAKRPLADAAAVNTTRFALLEVLKSAGLPVETGSGGLTKFNRSQQNLEKSHWLDAACVGKSTPILNIKEIKPLLITANGHGSRQSCRTDKFGFPSRYVPRFKFVKGFQTGDIVKAVVGTGKKIGEYVGRVAVRTTGSFNISTNNGLVQGISYKYCSAIHKKDGYGYAN

SEQ ID NO: 25128 - protein, 413 aa, unidentified; identical to SEQ ID NO: 23760
  source 1..413: note = Erysipelotrichaceae bacterium SG0102

SEQ ID NO: 25129 - protein, 413 aa, unidentified; identical to SEQ ID NO: 23772
  source 1..413: note = Erysipelotrichaceae bacterium SG0102

SEQ ID NO: 25130 - protein, 451 aa, unidentified
  source 1..451: note = Erysipelotrichaceae bacterium SG0102
MSVCVVAPDKKPLMPTSEYRARKLLKSGKAVIFKYKPFTIMLTRIVSENMQPIEYCCDTGYKHIGVSIKSEKHEYFDCQFDMLQDEKKCHDDRRKMRRARRNRLRYRKPRFDNRTASKKEGWLAPSLRNIRDQHIRIFERFLEVMPIVSATFEMGSFDVHAMHEFEATGTVLKGDDYQKGPRYGMNTLRKAVFYRDNYTCQVCGKTTDKGAILRVHHIGFKTGDHTNRISNLLTVCTKCHTSANHKPGGKLYDLKPRTKPFNGAAFMNAVRWQMFRTLKSTHPDLEWHMTYGAATQEARRVLHLEKSHANDAYAMGEFHPRRRTPFMHFQKLRRNNRILEKFFDAKYVDARDGKTKKGAELSCGRTDRSESRHSEKNLRVFRERKVSKGRRVIRRSHYTLRPGDNVVIGGEKHRAKGVHNKGTYVVTDAKKSVPVKKVEKIIHAGGYMPVK

SEQ ID NO: 25131 - protein, 447 aa, unidentified
  source 1..447: note = Erysipelotrichaceae bacterium SG0102
MSVCVVAPDKKPLMPTSEYRARKLLKSGKAVIFKYKPFTIMLTRIVSENMQPIEYCCDTGYKHIGVSIKSEKHEYFDCQFDMLQDEKKRHDDCRKMRRARRNRRRYRKPRFDNRTASKKEGWLAPSLRNIRDQHIRIFERFLEVMPIVSATFEMGSFDVHAMHEFEATGTVLKGDDYQKGPRYGMNTLRKAVFYRDNYTCQVCGETADEGAILRVHHIDFETGDHTNRMSNLLTVCTKCHTSANHKPGGKLYDLKPRTKPFNGAAFMNAVRWQMFRTLKSTHPDLEWHMTYGAATQEARRVLHLEKSHANDAYAMGEFHPRRRTPFMHFQKLRRNNRILEKFFDAKYVDARDGKTKKGAELSCGSESRHSEKNLRVFRERKVSKGRRVIRRSHYTLRPGDTVVIGGEKHRAKGVHNKGTYVVTDAKKSVPVKKVEKIIHAGGYMPVK

SEQ ID NO: 25132 - protein, 451 aa, unidentified
  source 1..451: note = Erysipelotrichaceae bacterium SG0102
MSVCVVAPDKKPLMPTSEYRARKLLKSGKAVIFKYKPFTIMLTRIVSENMQPIEYCCDTGYKHIGVSIKSEKHEYFDCQFDMLQDEKKRHDDRRKMRRARRNRLRYRKPRFDNRTASKKEGWLAPSLRNIRDQHIRIFERFLEVMPIVSATFEMGSFDVHAMHEFEATGTVLKGDDYQKGPRYGMNTLRKAVFYRDNYTCQVCGETADEGAILRVHHIGFETGDHTNRMSNLLTVCTKCHTSANHKPGGKLYDLKPRTKPFNGAAFMNAVRWQMFRTLKSTHPDLEWHMTYGAATQEARRVLHLEKSHANDAYAMGEFHPRRRTPFMHFQKLRRNNRILEKFFDAKYVDARDGKTKKGAELSCGRTDRSESRHSEKNLRVFRERKVSKGRRVIRRSHYTLRPGDTVVIGGEKHRAKGVHNKGTYVVTDAKKSVPVKKVEKIIHAGGYMPVK

SEQ ID NO: 25133 - protein, 407 aa, Succinivibrio dextrinosolvens; identical to SEQ ID NO: 14790

SEQ ID NO: 25134 - protein, 417 aa, Bacillus selenitireducens
MFVYVLNKNGQPLMPCKPRKARLLLNEKKAKVVKQTPFTIQLLYGSSGYKQPVSLGVDAGTKHIGFSAPTEKDVLFEGDVQLRTDIQDKLATRRQYRRSRRSRKTRYRQPRFDNRKKEKGWLAPSVQHKVDSHIRFVEKVHALLPITTITVEVAQFDIQKIKKPEIEGEGYQQGDQFGFWNVREYVFFRDNHRCQHCKGKSKDKILNVHHIESRKTGGDSPDNLLTLCETCHKKIHREGLEHLFQRKKKPFRDASQMAVMRWFIYNGLKARYPDAKLTYGYLTKNTRIEHSLEKSHAVDARCISGHPTAKPSEATYQYKQVRKNNRQLHKTTILKGGIRKANKAERFVKGFQLFDKVLCEGQPCFIFGRRKTGSFDLRLLDGTVISRGKSYKKIALKEKATSWLVERSETVHIPPHE

SEQ ID NO: 25135 - protein, 586 aa, unidentified
  source 1..586: note = Erysipelotrichaceae bacterium SG0102
VSTALSFLREGRKRGYVIMSGKKNKSNHYIYVVDRHGNPVMPSRRPGRIRHLLKEGKAVPISTHPFVVKLKYDIPGRTQPIHLGIDTGRENIGVGASLENGENVFLSDVETKNKAVTKAMSDRRAYRMSRRRHRREKKQRHAHAKKSEMKNGRPAVKGERHTRKTVGRDIRYPGCKNPVTHKVIKGKEARIANRRRDEGWQTPSARQLIQTHMRIVRNVMKFLPVTHITIEMVSFDFQKLANVEIKNWEYSDGPLHGFKSPADYVWARQNGKCYFCDKKIAICHHAMHRAKGGSDRVGNLVGLCPECHQKLHSDRDMDKRLQEEFGTPKTCISVLNSAMPEIDRQMRALCDARGIVYDTCTGFDTYEARKRYGIPKDHCTDGYAISLYGRNANNVCLTDSVCMMRRFRKKSGSIIQKLNQRVYKLKGKVVAVNRHKRTDQKEPALDDYMSRYAQKHSEAECRRHFHELKIIPARRTYTYRKQKLVSPVHIGDTVRYEKRNKTSGITKKAVFVAEEIDMFNGKVKYGDQSGRYGKKSPLMKYCRPIKAGSLKFIRTIRLADCLSMARKEAEVRRKKQLKKPKNLVID

SEQ ID NO: 25136 - protein, 451 aa, unidentified
  source 1..451: note = Erysipelotrichaceae bacterium SG0102
MSVCVVAPDKKPLMPTSEYRARKLLKSGKAVIFKYKPFTIMLTRIVSENMQPIEYCCDTGYKHIGVSIKSEKHEYFDCQFDMLQDEKKRHDDRRKMRRARRNRLRYRKPRFDNRTASKKEGWLAPSLRNIRDQHIHIFERFLEVMPIVSATFEMGSFDVHAMHEFEATGTVLKGDDYQKGPRYGMNTLRKAVFYRDNYTCQVCGETADEGAILRVHHIGFETGDHTNRMSNLLTVCTKCHTSANHKPGGKLYDLKPRTKTFNGAAFMNAVRWQMFRTLKSTHPDLEWHMTYGAATQEARRVLHLEKSHANDAYAMGEFHPRRRTPFMHFQKLRRNNRILEKFFDAKYVDARDGKTKKGAELSCGRTDRSESRHSEKNLRVFRERKVSKGRRVIRRSHFTLRPGDTVVIGGEKHRAKGVHNKGTYVVTDAKKSVPVKKVEKIIHAGGYMPVK

SEQ ID NO: 25137 - protein, 451 aa, unidentified
  source 1..451: note = Erysipelotrichaceae bacterium SG0102
MSVCVVAPDKKPLMPTSEYRARKLLKNGKAVIFKHKPFTIMLTRIVSENMQPIEYCCDTGYKHIGVSIKSEKHEYFDCQFDMLQDEKKRHDDRRKMRRARRNRLRYRKPRFDNRTASKKEGWLAPSLRNIRDQHIRIFERFLEVMPIVSATFEMGSFDVHAMHEFEATGTVLKGDDYQKGPRYGMNTLRKAIFYRDNYTCQVCGETADEGAILRVHHIGFETGDHTNRMSNLLTVCTKCHTSANHKPGGKLYDLKPRTKPFNGAAFMNAVRWQMFRTLKSTHPDLEWHMTYGAATQEARRVLHLEKSHANDAYAMGEFHPRRRTPFMHFQKLRRNNRILEKFFDAKYVDARDGKTKKGAELSCGRTARSESRHSEKNLRVFRERKVSKGRRVIRRSHYKLRPGDTVVIGGEKHRAKGVHNKGTYVVTDAKKSVPVKKVEKIIHAGGYMPVK

SEQ ID NO: 25138 - protein, 451 aa, unidentified
  source 1..451: note = Erysipelotrichaceae bacterium SG0102
MSVCVVAPDKKPLMPTSEYRARKLLKSGKAVIFKYKPFTIMLTRIVSENMQPIEYCCDTGYKHIGVSIKSEKHEYFDCQFEMLQDEKKRHDDRRKMRRARRNRLRYRKPRFDNRTASKKEGWLAPSLRNIRDQHIRIFERFLEVMPIVSATFEMGSFDVHAMHEFEATGTVLKGDDYQKGPRYGMNTLRKAVFYRDNYTCQVCGETADEGAILRVHHIGFETGDHTNRMSNLLTVCTKCHTSANHKPGGKLYDLKPRTKPFNGAAFMNAVRWQMFRTLKSTHPDVEWHMTYGAATQEARKVLHLEKSHANDAYAMGEFHPRRRTPFMHFQKLRRNNRILEKFFDAKYVDARDGKTKKGAELSCGRTARSESRHSEKNLRVFRERKVSKGRRVIRRSHYTLRPGDTVVIGGEKHRAKGVHNKGTYVVTDAKKSVPVKKVEKIIHAGGYMPVK

SEQ ID NO: 25139 - protein, 451 aa, unidentified
  source 1..451: note = Erysipelotrichaceae bacterium SG0102
MSVCVVAPDKKPLMPTSEYRARKLLKSGKAVIFKYKPFTIMLTRIVSENMQPIEYCCDTGYKHIGVSIKSEKHEYFDCQFDMLQDEKKRHDDRRKMRRTRRNRLRYRKPRFDNRTASKKEGWLAPSLRNIRDQHIRIFERFLEVMPIVSATFEMGSFDVHAMHEFEATGTVLKGDDYQKGPRYGMNTLRKAVFYRDNYTCQVCGETADEGAILRVHHIGFETGDHTNRMSNLLTVCTKCHTSANHKPGGKLYDLKPRTKPFNGAAFMNAVRWQMFRTLKSTHPDLEWHMTYGAATQEARRVLHLEKSHANDAYAMGEFHPRRRTPFMHFQKLRRNNRILEKFFDAKYVDARDGKTKKGAELSCGRTARSESRHSEKNLRVFRERKVSKGRRVIRRSHYTLRPGDTVVIGGEKHRAKGVHNKGTYVVTDAKKSVPVKKVEKIIHAGGYMPVK

SEQ ID NO: 25140 - protein, 451 aa, unidentified
  source 1..451: note = Erysipelotrichaceae bacterium SG0102
MSVCVVAPDKKLLMPTSEYRARKLLKSGKAVIFKYKPFTIMLTRIVSENMQPIEYCCDTGYKHIGVSIKSEKHEYFDCQFDMLQDEKKRHDDRRKMRRARRNRLRYRKPRFDNRTASKKEGWLAPSLRNIRDQHIRIFERFLEVMPIVSATFEMGSFDVHAMHEFEATGTVLKGDDYQKGPRYGMNTLRKAVFYRDNYTCQVCGETADEGAILRVHHIGFETGDHTNRMSNLLTVCTKCHTSANHKPGGKLYDLKPRTKTFNGAAFMNAVRWQMFRTLKSTHPDLEWHMTYGAATQEARRVLHLEKSHANDSYAMGEFYPRRRTPFMHFQKLRRNNRILEKFFDAKYVDARDGKTKKGAELSCGRTARSESRHSEKNLRVFRERKVSKGRRVIRRSHYTLRPGDTVVIGGEKHRAKGVHNKGTYVVTDAKKSVPVKKVEKIIHAGGYMPVK

SEQ ID NO: 25141 - protein, 518 aa, unidentified
  source 1..518: note = Erysipelotrichaceae bacterium SG0102
METLLPDVSALQATAPESYEGGHHDMPKTKLEQELSETDYIYVLSADGDPLMPTRRRGHVKRLLNKGKARIVSHVPFVIQLKYDGSKNTQPLFGGIDPGRTNIGAAVVTPEGKCVYRSHTASRNRDVPKNMEARKSHRQASRRGERLRRKRRAKANGTTTEFPDGRMLPGYKKPVMVKDIVNTTAKFSYRKRPEKWLTPTANQLVQTHENLICRISAILPVTDWTIEANKFAFMQMDNGKCYGTDFQNGRMKGYKNSHEYVYIRQNGVCPMCGAPIEHYHHIIPRSRGGSDLPENILGVCMKCHARIHKGELRSDMKGVMKKYGSLSVLNQAIPYIWQWMTETYGEDHAHFCTGVETQTLRDDLGLPKDHDIDALCIACIGSGITPVRRLPRTFEIVQFCRHSRANINNQRERTYRLDGRIVCRNRHKRFEQKGDSLEEFRQKYPDQVSRLTVTKSTRYYNDADRLMPGAVFLFDGERYVLQSQLTGGRYYRAVGCEKRNFPAAKCTIIRENAGLVYV

SEQ ID NO: 25142 - protein, 410 aa, Tissierella creatinini
MVYVLNKDGKPLIPTNRHGKVKHLLKEGKAKVVKRTPFTIQLLYSTTEFVQPITLGVDAGSKIIGLSATTEDEELFSSEVVLRNDIVELLSTKRQNRRTRRNRLRYRKPRFLNRVKAKNKGWLAPSIRHKIDSHLKVIANIYKILPISNLIIETASFDIQKIKNPQISGTDYQEGEQLGFWNVREYVMWRDGHECQHCHGKSKDNVLNVHHKISRKTGGDSPGNLVTLCETCHSLHHQGKLTLKITKNKSYRDAAFMGIMRWAVYNKLKEIYPNVTMTYGYITKNNRITNGIEKTHTADAFCIAGNLKAKRSSVIYLQAFKRRHNRQIHKANFLKGGKKKLNQSPYMVKGFRLFDKVLFQEQECFIFGRRATGYFDLRKLDGTVIHKSASVKSIKLLEKKSTLLIERQVA

SEQ ID NO: 25143 - protein, 418 aa, Sulfobacillus sp.
MFVYVLNHHGQPLMPCSPRKARVLLQQGKATVVQRTPFTIRLRYGSSGYKQAVSLGVDAGTKHLGLSATTEKKVLFEADMMLRTDIQALLSTRRAFRRARRHRKTRYRQPRFLNRKKPEGWLPPSVQNKVDAHVKVIQSVLSILPITHITVEVAQFDIQKIKNPDIAGIDYQQGEQMGFWNVREYVLFRDNHTCQYCRGLSGDKILNVHHIESRKTGGDAPDNLITLCETCHDTIHRAGLTHLFQRPHESFRDAIQMTVMRWFIYRGIQKVFPHADVTYGYMTKNTRIRNCLQKNHLIDARCISGHPMATPLNETYLIKQVRGQNRQLHKATILKGGVRKANKSPKVVLGFQLFDKVRYNGQECFIFGRRLRGAFDLRLLDGTKITSGASHHKLMLLERASTLLIQLEKGEKAASSLA

SEQ ID NO: 25144 - protein, 407 aa, Succinivibrio dextrinosolvens; identical to SEQ ID NO: 12001

SEQ ID NO: 25145 - protein, 410 aa, Tissierella creatinini; identical to SEQ ID NO: 25142

SEQ ID NO: 25146 - protein, 431 aa, Methylobacter whittenburyi
MNKVFVLDREKNPLMPCHPARARQLLDRKRAKVFRLHPFTIILQDRAGGAVQPVEIKLDPGSKITGIAITVLGDNGRKLVWSCHLSHRGCTIKDSLQKRRGIRRSRRHRHCRYRQPRFDNRTRSDGWLPPSLISRVDNVFTWVKRLLSWTPGQCIHVETVRFDTQKLMNPEISGAEYQQGELQGYEVREYLLEKFHRVCAYCGLGDRPLEVEHVVAKANGGSNRVSNLALSCRDCNERKGTQRVEDFVTDAVKLERLRKQLKTPLKDATAVNATRYAIGNKLKNLGLPVRFWSGGRTKMNRIQQGYGKDHFIDAACVGDTGSRVFIPEALTPLTITAKGRGNRQMCLMDKFGFPRTRPKGVKQVDGFTTGDSVRLNQPRGKYRGSWTGSISIRASRVFDITTRNKEGKNQKISASSQHFIRLQGFDGYVYG

SEQ ID NO: 25147 - protein, 472 aa, Nocardiopsis sp.
VVSGADHVRGETTLISPDVGGVTTRPLAGERPRERHPSVFVLDKNQIPLQPCHPARARKLLNKGRAVVARHTPFTIRLKDRTIAESEVDGVQVGIDPGSKHTGIAVFTQHAGERRGRYAIQLDHRGARIRKKIGQRSAYRRGRRFRNLRHRAPRFANRTRPQGWLAPSLRHRVENTTGWVDRLTRWAPVKAVHVERVAFDTHALSAGKPLEGVEYQRGTLHGYEVREYLLAKFDRACVYCGATNTPLNLDHVHPRSRGGSDRVSNLVLACVTCNQAKNNRPVEEFITNKQVLARILARAKAPLRDAAAVQSTRWALWRALNERLPTHVGSGGRTKWNRTRNHLPKTHTLDALSVGKIDTITQTTNRVLVAGCAGRGSYARTRPDKHGFPRLRLPRTKEFFGFSTGDLVRAVVPQGKKTGTYTGRVAVRASGSFNITTTQGTVQSIRYKHMRLLQRADGYGYTWKGEGVSSRS

SEQ ID NO: 25148 - protein, 422 aa, Petrotoga mobilis
MLVYVLNKHGEPLMPCKSSKARKLLKDGKAKVVRKEPFTIQLLYGSSGYKQPITLGVDAGSKTVGLSATTKKKELFASEVEIRDDITKLISQKRQYRRDRRLRKTRYRKPRFLNRVHSKNKGWIAPSVEHKIKSHIKLIDLVYRLLPITKIVVEVASFDIQKIKNPNIEGKQYQQGEQLDFWNVREYVLWRDNYTCQHCKGKSKDKRLNVHHIESRQIGGNAPSNLITLCETCHRDYHNGKIKLNFKRGQKFKDATFMGIMRWTLYNRLKDLYSNVHLTYGYITKNTRIQNNLPKTHRIDALCISGHPQAKQLDYYYHIKEVRRHNRQIHKANILKGGTRKLNQAPYLVHGFRLFDKVRYNGIECFIFGRRSTGYFDIRKLDGTVIHRSAKSKDLILVSKAKTLLWERRENSAFLSPLPYLP

SEQ ID NO: 25149 - protein, 436 aa, Petrotoga mobilis
MLVYVLNKYGKPLMPCKPSKARKLLKEGKAKVVRKEPFTIQLLYGSSGYKQPITLGVDAGSKSIGLSATTENKELFAAEVEIRDDIPKLISQKRQYRKGRRFRKTRYRKPRFLNRVHSRKKQKQADATQPYGRQGNWLAPSVEHKIKSHIKLIDLVHSILPITTIVVEVASFDIQKIKNPNIEGKQYQQGEQLDFWNVREYVLWRDNYTCQRCKDKSKDKRLNVHHIESRQIGGNAPSNLITLCETCHKDYHDGKIKLDFKRGQKFKDATSMNIMRWTLYNRLKDLYSNVHLTYGYITKNTRIQNSLTKTHRIDALCISGHPQAKQLDYYYHIKEVRRHNRQIHKAKILKGGIRKLNQAPYLVHGFRLFDKVKYKGIECFIFGRRSTGYFDIRKLDGTVIHRSAKSKDLILVSKAKTLLWERRENSAFLSPLPYLP

SEQ ID NO: 25150 - protein, 391 aa, Bacillus sp.
  source 1..391: note = strain FJAT-29814
VGFTTSLTNLNEGNSLTVVLPVQTEEDSQSKKRARRSYRRSRRNRKTRYRQARFLNRKRPEGWLPPSLMARVNNVLSMVNRFKKLVPLSDCSLELVKFDTQKMMNAEISGIEYQQGTLQGYEVREYLLDKFGRRCAYCGTKDVPLEIEHVHPKSRGGSNRVSNLTLACRECNEEKDNLTLDEWSIRLANKKDKRSKWILSSLPTIIKQLQKPLKDTAVVNSTRWKLYECLIGTSLTIECGTGARTKMQRIQHELTKEHYYDAVCIGESTPTEPLLFKTNQVLQIKAKGRGSRYRSGTDKFGFPIRQMPRIKMIHGFMSGDMVKAIVPKGKYQGTWFGQIAMRSSGYVDIKDKNGKRMVQGIQAKYCQIVQRFDGYSYFVEKRKESAIPPHA

SEQ ID NO: 25151 - protein, 451 aa, synthetic construct
MFVAVISKTGVRLMPTSEYRARKLLNSGKAIIYGYRPFTIQLTERETGALQPVELCVDTGYIHIGVSVKSEKHEYLELQVDTLTNEKKKHDERRMYRKQRRNRKRYRKPRFDNRKRESGWLAPSLRHKKEVHLQVITKICDVYPIADITLEMGNFDTQVLKAQEKGKPIPQGTDYQHGERYGIATLREAVFTRDEYKCQCCDRGIKDGAILHAHHIQYRSQGGTNRMSNLITVCEKCHTPANHKPGGKLYGWKPKIASFKDATYMTAVRWQLYRKVKEMFPGIHVKITYGAETKERRRILDIKKSHVNDAFVMGQFHPKHRSLPVLYKKKRRNNRCLEKFYDAKYIDSRNGKTRSGQELFNGRISRNHKKDSENLHRYRKKKVSRGKRNIRVQRYKIQPHDIVLFDGKKYETTGCHNKGTRAILLPEKKSKSVEKLTIYKYAGGYYPSKFA

SEQ ID NO: 25152 - protein, 517 aa, Leptospirillum sp.
MLPQSRALEAADADNREGQDETVGGKGAIPKPVANIPEGRRFERSALRPQGQNNVRFDGGFVQVFVLDKKKKPLMPCHPARARELLREGRAVVHRIAPFTIRLKDRIGGETQPIRVKLDPGSKTTGLAAAREEETDGEKTAHVLFQAEIHHRGSAIKKKLDQRRAFRRRRRSQLRYRTPRFDNRTRPDGWLPPSLRHRVDTTLAWVERLRRLVPVSELSQELVRFDMQKIENPEISGIEYQQGTLAGYEVREYLLEKWGRTCAYCGSENVSLEIDHIHPRSLGGSDRVSNLTLACRSCNLKKGNRPVGEFLAKTPERLSTILARAKAPLKDAAAVNTTRWALFQALKATGLPVEVASGGRTKYNRTRLGIPKGHSLDAACVGKVDRIEGWNRPCLSIKATGRGSYQRTRLDAFGFPRGSLTRTKAHFGFQTGDRVLAIVTKGKKTGTYAGRVAVRSSGSFNIQTGSRVVQGISYKDCRLLQRADGYGYSIHPITEKGEAGEALPLPGMNAGVSRARG

SEQ ID NO: 25153 - protein, 440 aa, Methylobacter whittenburyi
MAVFVLDKKGKPLMPCSEKRARLLLERGRAVVVKRYPFTIRLKDRVGGDTQPLRIKLDPGSRQTGLALVREHDRVDADTGELKTHLTVLSLFQLNHRGRMISEHLTARRAMRRRRRHNLRYRAVRFNNRTRHKGWLAPSLQHRVDTVMSWVNKLRRLAPVTALSQELVRFDLQQLENPGISGIQYQQGTLFGFEVKEYLLAKWGRQCAYCSQSEVALEVEHIVARARGGSHRISNLTLACRPCNQAKGARTIEDFLRHQPELLKQILAQAKAPLKDAAAVNSTGWALFNALTATGLSVSTGSGGLTKFNRKQHLIPKSHALDAACVGRVDSITHWNRPVLAVQCMGRGSYQRTRLNQYGFPRSYLMRQKAVKGFQTGDMVKAVVSKGKKAGEYVGRIAVRASGYFNIHTPTGTVQGISHKACTLIARNDGYGYHLQPKIA

SEQ ID NO: 25154 - protein, 449 aa, unidentified
  source 1..449: note = uncultured Erysipelotrichaceae bacterium sp.
MKTVFVIANDGTRLMPTNIKRARRLMKRREAVICRHDPFTIKLTRDSEHNVQDIEFKQDTGDKHIGISVCSEKHEYISAQYDPLKDETKKHNDQRKYRRTRRNRRRYRKPRFDNRKKDRGWFAPSIEHKKELHVRLFEKYNDVCPIKKAVFEVGSYDIHAMQEYEQNGAVLTGTDYQKGPRYGMTTLREAVLYHQNYICPLCRKSLIGARTAIHHRGFRTGDRSNRLNNLMAVHAWEHTSANHKPGGLLWDIKPDHRPFKGAAFMNIVRKAIADEIEKRHPNVAVIRTYGAETKLRRQDLHIRKSHANDAYAMGEYHPKHRSQTMHFQKHRRNNRILSKFYDSKYIDVRDGRKKSGAELSCGRTNRCVPRNNPENNRVFRGQKLAKGRVSVRRRRYPINSEDAVIVNRKKLIASGTAHYGEYVHFGKGHKDVKTSQVRIRCHAGGWVQI

SEQ ID NO: 25155 - protein, 431 aa, Methylobacter whittenburyi; identical to SEQ ID NO: 25146

SEQ ID NO: 25156 - protein, 437 aa, Methylobacter whittenburyi
MTGNRQLFRFTGMNKVFVLDREKNPLMPCHPARARQLLDRKRAKVFRLHPFTIILQDRAGGAVQPVEIKLDPGSKITGIAITVLGDNGRKLVWSCHLSHRGCTIKDSLQKRRGIRRSRRHRHCRYRQPRFDNRTRSDGWLPPSLISRVDNVFTWVKRLLSWTPGQCIHVETVRFDTQKLMNPEISGAEYQQGELQGYEVREYLLEKFHRTCVYCGLGNRPLEVEHVVAKANGGSNRVSNLALSCRDCNERKGTQRVEDFVTDPVKLERLRKQLKTPLKDATAVNATRYAIGNKLKNLGLPVRFWSGGRTKMNRIQQGYGKDHFIDAACVGDTGSRVFIPEALTPLTITAKGRGNRQMCLMDKFGFPRTRPKGVKQLDGFTTGDSVRLNQPRGKYRGGWAGSVSIRASRVFDITTRNKEGKKPKDIGVQSTFYSAARV

SEQ ID NO: 25157 - protein, 454 aa, Methylobacter whittenburyi
MREDMAVFVLDKHKRPLMPCSEKRARLLLERGRAVVVKRYPFTIRLKDRVGCDTQPLRIKLDPGSRQTGLALVREHEDVDADTGELKTHLTVLSLFQLNHRGRVISEHLTARRAMRRRRRQHLRYRAPRFNNRTRPEGWLAPSLQHRVDTVMSWVNKLRRLAPVTALSQELVRFDLQQLENPRIAGFQYQQGTLYGFEVKEYLLAKWGRQCAYCSQGEVPLEVEHIVARARGGSHRISNLTLACRPCNQAKGARTIEDFLRHQPERLKQILAQAKAPLKEAAAVNSTRWALFNALTATGLSVSTGSGGLTKFNRKQHLIPKSHALDAACVGRVDAITHWNRPVLAIQCMGRGSYQRTRLNQYGFPRGYLMCQKAVKGFQTGDSVKAVVSKGKKAGEYAGRIAVRASGYFNIHTSTGTVQGISHRDCQLMARNDGYGYHLQPKIAANGDCENRIG

SEQ ID NO: 25158 - protein, 391 aa, Bacillus sp.; identical to SEQ ID NO: 25150
  source 1..391: note = strain FJAT-29814

SEQ ID NO: 25159 - protein, 428 aa, Ktedonobacter sp.
LMVCVLDQKKRPLMPCTPKRARLLLARGRAVVHRVQPFVIRLKDRRVEDSVLQPIALKIDPGSKTTGMALARVEATEEGEVHRALFLCEVQHRGQRVHDHKVTQANARRRRRSANLRHRAPRFDNRALPQGWLPPSILSRVGNVVTWTDRLIRWSPVTRLEVERVRFDTQLLQNPEIDGVQYQHGELAGWEVRAYLLIKYEYRCAYCGKTNLPFEIDHIRPRSRGGSNRVSNLVLACHACNQAKGSQTASEFGHPEVEARAKAPFKDAAAVNASRYKLVEALSVFGLPLGTWTGGRTRWNRVRFGVEKSHALDAMCVGELAGVQFHTPNTLTIMATGRGRHCRTNFTKYGFPSSYLTRKKQVRGFKTGDRVRAVVPASFKTAGTHVGRVQVRKSGSFDIETREREVDGVHAKYCSLVQRADGYDYAIS

SEQ ID NO: 25160 - protein, 437 aa, Methylobacter whittenburyi; identical to SEQ ID NO: 25156

SEQ ID NO: 25161 - protein, 454 aa, Methylobacter whittenburyi; identical to SEQ ID NO: 25157

SEQ ID NO: 25162 - protein, 440 aa, Methylobacter whittenburyi
MAVFVLDKHKRPLMPATEKRARLLLARGRAVVVKRYPFTIRLKDRVGGDTQPLRIKLDPGSRQTGLALVREHDRVDADTGELKTHLTVLNLFQLNHRGRVISEHLTARRAMRRRRRQHLRYRAPRFNNRTRPEGWLAPSLQHRVDTVMSWVNKLRRLAPVTALSQELVRFDLQQLENPGIAGIQYQQGTLYGFEVKEYLLAKWGRQCAYCSQSEVALEVEHIVARARGGSHRISNLTLACRPCNQAKGARTIEDFLRHQPELLKQILAQAKAPLKDAAAVNSTRWALFNALTATGLSVNIGSGGLTKYNRKQHQIPKSHALDAACVGQVDAITHWNRPVLAIQCMGRGSYQRARLNQYGFPRGYLMRQKAVKGFQTGDSVKAVVSKGKKAGEYAGRIAVRASGYFNIHTPTGTVQGISHKACTLIARNDGYGYHLQPKIA

SEQ ID NO: 25163 - protein, 440 aa, Methylobacter whittenburyi; identical to SEQ ID NO: 25162

SEQ ID NO: 25164 - protein, 440 aa, Methylobacter whittenburyi; identical to SEQ ID NO: 25153

SEQ ID NO: 25165 - protein, 471 aa, unidentified
  source 1..471: note = Candidatus Diapherotrites archaeon
METKQQQLFKRNTYTPKDASQVFGSVVLSLNREETLSEQDLKTLDNSLDVNIQSGKTEQNLRVFVLNMQKKPMMPCKPAKARHLLQQKKAEVVSCKPFTIQLTIPTGETKQEITLGIDSGYKNIGFSATTQKRELVSGELELRTDVSKKISERAMYRRGRRNKLWYRKPKFLNRVKTKCKNWLAPSVQHKIDTHIRLVEKIKILLPISKVIVEVAQFDAQKLQNVDIQGVEYQQGQTQGHDNLRAFILQRDGYTCQICNKKDGMFNIHHIIQRRDGGSDRPDNLVTVHKSCHDDFHSGKIKHTFKKPKSFKETAMMNNIKKFVVDKLGCNCTYGYITKRKRIENNLEKTHYNDAFVISGISNQKRTKPFFSKQIGRNNRCLQLNRKGFKPSIRKQRYSFQPNDIVEFEGNKYLTKGSHNKGTRIIIVRDNKNKSVSIKKVRIICFGKGIVFSTRQFLTTLKDGVSLPQTIR

SEQ ID NO: 25166 - protein, 472 aa, Nocardiopsis sp.; identical to SEQ ID NO: 25147

SEQ ID NO: 25167 - protein, 525 aa, synthetic construct
VSLPVKQVNRDKTSTGNSFKAPQRARRRTCRSAGAEQGRNCHLERNIIMIIALDKNKRPLGFLTERRCRILMERKRAVLYRVFPTVVILMDMDVRKLRDLPSYRIKIDPGSKYTGIAIVRNDTDELVYAMQIEHRGDAVRAGLQKRKMARRNRRSRETGYRRAKWGNRCLSDGDKKSYNSSRKDGWLPPSIRSVADNVLTWVQRLSRWVNITDCSLEAVRFDTQLLENPNIKGEEYQHGTLFGYEIREYLLEKFGHTCQYCGGESGDPVLEWEHIHPKSRGGSNRVKNALLSCSSCNRDKDNQTPEEWIGQVSFRLSHEKGKKRELDSKRIELIQKVIDGKPEGQPMRYAAWVSSSRRYLENHLFQIFRDVECSSGGRTKYNRTKLGYPKEHHYDALCIGTVPEKGYHDRTNGYYLYAKATGRGTRLRGTLNKCGIIVTKWTSRKKNFFGFQTGDIVVAEVPHKTPKPYKHEGRFVGRVMVRASGSFDIRTTGGRLATVKAGFCRLLQANSGCAYSMERAISLGH

SEQ ID NO: 25168 - protein, 418 aa, Sulfobacillus sp.; identical to SEQ ID NO: 25143

SEQ ID NO: 25169 - protein, 473 aa, Streptomyces sp.
VREETRTASPGDAGITPNHPVGEKPRERHPFVFVLDKHGTPLQPCTAARARKMLKKGRAVVHRHTPFVIRLKDRTAAQSETDGVEIGIDPGSKHTGIALFTARAGERRARYSVQLDHRGATIRKKLEQRAAYRRGRRTRNLRYRAPRFLNRARREGWLPPSLRHRVDTTVSWVSRLARWAPVRAVHVERVAFDTHALAAGRPLEGAEYQRGTLHGYEVREYLLAKWNRTCAYCGATGVPLNIDHIHPRSRGGSDRISNLALACLPCNETKSNRLVDEFLAHKPNLLARIKAQAKAPLRDAAAVQSTRTALWRALDARWPTHTASGGRTKWNRTRCHLAKTHTLDALAVGTLDTIAETVTTVLLAGCIGRGTHTRTRTNKHGFPRLRMPRRKRFFGFATGDLVTAHVPTGKKAGTHTGRVAVRTTGSFNITTRHGTVQGIRHKHVRLLQQADGYAYTTLPEHSTAIPRRTAPED

SEQ ID NO: 25170 - protein, 413 aa, unidentified
  source 1..413: note = Candidatus Acidulodesulfobacterium acidiphilum
MLVYVLSIDGKPLMPCKAAKARKLLKQGRAKVVKRTPFTIQLNFDCENQVQDVKLGVDTGYKHVGLSAVSSDKELFRSEVELRTDIQKLLSEKRQYRRTRRNRLWYRKARFLNRGIKAGWLAPSVEHRLNEHVKAVDFVKSILPVSEITVEAAVFDIQKIKNPDITGTDYQNGDQKDFWNVREYVLYRDGHKCQACNGKSKDKVLNVHHIESRQTGGDRPDNLITLCESCHKAYHKGKIELKVKKHKAFKAETIMSILRWKIVNKLRELGNAVSITYGYLTKSSRIALKLEKSHANDAFCIAGGSGQERTDNNYFIKYVRKCNRSLFKANLLKGGKRKVNTIKQAFGFHRFDKVLYGKIECFIYSLRSSGYFDLRLLTGEKINASVKYIKLRLIETFKTRRIALLPCMGVSEL

SEQ ID NO: 25171 - protein, 396 aa, synthetic construct
MVYVLDKSGKPMMPTKRYGWVRRALRDGRAKVVRRDPFTIQLTYEPDTHVLQDTTLGIDIGYENVGTSVLTKQKELFSGNFKLRTDIQKRLSYRRMYRRTRRGRKTRYRKARFLNRKKYYADAPSVRHKVHSHVRIINLITSILPVNQLIVEVANFDAQKIKNPDIQGEEYQQGCQLGYQNVKEYVKSRDCHRCYFNTGKCSKKLEVHHIVFKSQGGSDAPSNLITVCDKCHKSIHDGKKPNPKASKYKSLRPISFMKTVSKRLQEMLPDIEYTYGYQTKQKRYNLNLGKSHVNDAFVIANGTSQVRCKTTNYVFKRKNNRQLGKLRKGFAPSSRKQRYPIQPKDLVEYEGKKYYAIGTHCKGKRVIVMYNGKKKSIAIKIIKLLFNQRSLLALTG

SEQ ID NO: 25172 - protein, 443 aa, synthetic construct
MTKTLTKQTTQACVLDQNGKPLMPTKRLGKVYRLLKTKKAHIVSYEPFTIQLDYEPDTHAIQPMTLGVDSGAIHSGYSVANEQREYYSSEVIARDNISYRISDRHMYRQNRRSRKTRYRKPRFNNRKNKKKGWLPPSLEQKVAVQLNEIDHLHRYFPIETIIVEVAEFDIQKIKNPDISGKDYQQGTLQGYNIRNYLLEKHSRKCFYCDKEVSTFEVEHMIPKARGGSNRIDNLTLSCHKCNQKKGTLTADEFIKRTLPVENAAKKLKQLSKEKRLFKYMAHMNATRWTLYNAINDKYSNVKITYGYVTKYNRIQAGLPKAHHIDAKCITGFAQVPSFDTTVVKMKMRRHNRQLHRATFSKGHVRKAASLPTVMFGFRLYDIVMYNNHQYYIKGRRSNGSFALVSVEGLKEENRTYKKLTFLAHTNAYLTNRYVNNEIVNANN

SEQ ID NO: 25173 - protein, 473 aa, Streptomyces sp.; identical to SEQ ID NO: 25169

SEQ ID NO: 25174 - protein, 438 aa, unidentified
  source 1..438: note = Synergistales bacterium
MYVFVLDKHKKPLTPCRPSRARHLLGSGRAVVHKRFPFTIRLKDRTAEESVIKPVRVKVDPGARFTGIAIVREDRQGGPRLIAGIELEHRGNAIRDNMTKRAGYRRRRRSANTRYRAPRFDNRRRPEGRFPPSLRHRIDTTVSWMRRLTRIAPVSGFSVESVKFDTQKMLDPEVSGKEYQQGELEGYEVREYLLEKWCRKCAYCNAGNVPLQVEHIVPRARGGSDRVSNLTLACERCNRAKGARPVKEFLHDKPALLGRIRAHAKAPLSSAAAVNSTRNALFGEMRAFGLPVETGSGGLTKYNRTRLGLPKSHVLDALCVGTVSSAKVLTDSVLHVRCTGRGRYSRTLTDKYGFPRAYLPRGKRFFGFATGDIVRTAVPKGKYKGTWTGRVAVRESGWFALSTGKNTPDGKKERVNVKWDTCKILERNNGYEYSVIAV

SEQ ID NO: 25175 - protein, 445 aa, synthetic construct
MKCIYVINQDGKPLMPTKRLGRVSRWLKSGQAHWYKNRRDTIQFNRKTTNYVQEVIQGCDLGDHLGMSVITNNQEVYASESYCNGKQTHRLMQKRKELRRTRRNRLRHRKPRFDNRKKKGYAPSIQRKLDFQIKEIKRLDEFLPITKRVFEGSTFDINKITHHAQLQKGYKTTFDFLYDRDHGCDALDGKHYPKKNMVIHHLVQRHNGGTNNPDNLVLLARKNHTQVNHKNGVLDKLAKQRQKKYKNADTRGAYFMNVLGKELPKYFDFVPTYGYITAKKRKKYGIAKTHHDDAFVIAGGTNQTKRFDTCFYREKQRLNNRSLEKFYDAQYRDLRTGEKEKGAVLSSGRTRRSLKDPRNNQRVFRANKLKKGRRTIRKQHYQLRPKDLVSYNDKIYRVKGMQNNGTRVLLITSAKDKSVAIKNVKYLFHINGVYQTERRTTAFIS

SEQ ID NO: 25176 - protein, 507 aa, synthetic construct
MSEYIYVIGMDGDPQMPIKRKRHVEKMLQTGRARVFRQVPYTIQLTYKNQPVLQPVTIAEDPGRSNIGMAVVSLSGELLSAAVVQTRNKEIVKLMEKRKLHRRASRNGERKARQRLAKRCHTMLKAGFLMRKLPMYRKDKRVKCLVIRNTEARFCNRKREDGWLTPSAEHLVRTHINLIHKMQKFLPITDVAIEINRFAFLSLEDPSISGVDFQNGPLKGYDDLNAAVEDLQDGHCLMCNSLIEHRHHIVPRSMQGSNTIGNIAGLCCKCHERVHKDARFEDRLKKKKAGLDKRYAAVSALNQAIPFICKRLEQEFGKEHVHYCSGRDTAMVRRSFGYHKTKEEQLHVVDAWCIAVLSLRQIPEKAPEFDHVHEILQFRRQDRSRIKAQTSRAYYHEGKKIVRNRKKAEGQGEDSLQEWRKRQVDRYGEEQTRKMISQLKVKKSIRRYNRLDRLMPGAVFYYQDVRYVMRGQHCEGTYLQAVGMGSKDFPAKKCKIVANNEGLVFVS

SEQ ID NO: 25177 - protein, 470 aa, unidentified
MCREAHVTAERREQRSNPIQSQVFVLNQEGQPLMPCHPARARQLLKKGRAVVHRAVPLVTRLKNRTKAIVQPVRLKVDPGSKATGMALVRHQPSDSITVLSLFELQHRGHQISESLTARRHMRRRRRGNLRYRAPRVLNRARSAGWLPPSLQHRIDTTLAWVKRLQRFAPIKNISCELVRFDMQAMQNPEIDGTAYQQGTLTGYEVREYLLETFGRQCVYCEAKDTPLQIEHIQPKALGGTNRISNLALACRSCNQKKAAQAIETFLADKPEIPRHIRKQAERPLKDAAAVNSTRWALTQALRSTGLPLELASGGRTKYNRERLNVPKTHALDAACIGEFRVLKGWRRSTLHLRCTGRGRYQRTRLSKDGFPVGYLMRHKRVNGFQTGDLVEAHVPSGKKAGTYQGRIAVRVSGSFNIRTDEEVIQGISYRYCKLIQRGDGYGYIVRPQMTSHKAQSMRPALNAALFHPQ

SEQ ID NO: 25178 - protein, 449 aa, unidentified; identical to SEQ ID NO: 14177
  source 1..449: note = uncultured Clostridiales bacterium

SEQ ID NO: 25179 - protein, 483 aa, synthetic construct
MNRSDKSVLVIGMNGIGLMPTTPRKARLLIRQKKAEVVRKMPFTIRLRYKTGSATQHVELGIDTGSQHIGVAVAADGKVLQKSEHVLRSTMDKRVLNEKRKAQRRSRRYRKTEYRHPKFSQHTKYVYVEKTVTRKKHKTHWKKISNRYGTNRKEGWLPPSIQQKIDMHIMIIRRYQEALPLDTSTNIEIARFDIQKINKPDIEGIGYQLGRMYQFENVKAYVLWKHSYRCPVCGTEFGTKRKSDGIMALPELHHKHFRSRGATDNPDEYMPVCTVDHRAAEHGDSGILGKLRKAEEKTIRGQRDMTFMNILRKRMWEAFPTAVFTYGNVTNADRKTIGLSKTHANDAVAIAMHRQILSGVRSVADAADTTYYKQVRKKKRSLHEATARKGRARPNTAAKRNAKNTKSLTVKGKKYCLRDKVEYNGQIAWIAGFSGKTGCRIQSIDDKYLSQPGKSYTSINLSDVNVLNHNNNWIVGSIQEKSI

SEQ ID NO: 25180 - protein, 460 aa, unidentified
  source 1..460: note = Candidatus Acidulodesulfobacterium acidiphilum
MKKMQKLLTRRITDTPTDTSLVRSNCGLSLNKEETLSAAGLKTVNNNPEENLLSGRRGRNPRVFVLNMRGKPLMPTTAGKARKLLRKGLAKVIMRTPFTIQLTYATGETKQPVSLGVDTGYKHIGLSAVSSAKELFRSEVELRTDIPKLLSEKRQYRRTRRNRLWYRKARFLNRVKSKKAGWLAPSVEHRLNEHIKAVEFIKSILPVMEITVEAAAFDIQKIKDPDISGVEYQNGEQAGFWNVREYVLYRDNHICQACNGKSKDKILNVHHVTPRADGGTDRPDNLITLCESCHKAYHKGKLELKIKKHKTFKAETIMSILRWKIVNKLKELGYTVSITYGYLTKSARIALKLEKSHANDAFCIAGGSGQERTDVINGSFTRRQNRCTQLNRKGFKPSIRKVRYKLQPNDLVRFNGKAFLVKGMQNLGKYIKLAGLKKPVKTELVNLIKYGKGLQFIPAL

SEQ ID NO: 25181 - protein, 426 aa, unidentified; identical to SEQ ID NO: 10545
  REGION 1..426: note = Ga0373625_0000621

SEQ ID NO: 25182 - protein, 487 aa, unidentified; identical to SEQ ID NO: 10077
  source 1..487: note = uncultured Clostridiales bacterium

SEQ ID NO: 25183 - protein, 509 aa, synthetic construct
MPDTDYIYVLGVDGKPQMPTKRKRHVKRLLNTGKARIACHVPYTIQLLYENTPVLQPVMLAEDPGRTNIGMAILSIKGELLMSAVVETRNREIVRLMNHRRGYRRASRIGERKARQRLAKRFGTMLKAGLIMRKLPKFAADKFITCHCIKNTESRFFNRKHPDGWLTPTSRQLVETHINLMHKIQKYLPVTDIAMEVNRFAFLSLENPSVSGVDFQNGPLKGFDSLHDTVNELQHGKCLLCDKKIEHYHHIVPRSINGSNTIGNIAGLCMECHDKVHKCAAYQKKLNDVKKGLDKKYGALSALNQAVPFICKCLEAEFGREHVSYCTGRDTAKMRSSFGFQKTKDNQMHETDAWCIGILALNKIPNVVPDFGQTYCIRQFRRQDRSLVCAQTERVYKLDGVTIAKNRKKRTEQKTDSLDDWYNRQVTLYGKKKADFMRSRLTVIKSKRRYNDLTRVMPGAVFMYNGECHVLSGRLTEGQYFRAVGDTKTNYPASKCKIIRHNEGLVFVC

SEQ ID NO: 25184 - protein, 600 aa, synthetic construct
LSTTPFLRDGACGKVLQAQVDQTEILERRWDKISTLHTSKKTNPGMPPQSQALESVSADNRKGKDETGHGRRGNTTTGMQHGREDRFLELTSPRNSHTATPEQSERAEARGVIAPPSSTASRVFVLDKHGNPLMPCHPARARKLLKSGRARVHRLAPFVIRIVDREIEQCEVPGVVVKIDPGSKHTGIACARVDEAGITHGLVSIQLDHRGQFIHEKMGQRARYRRRRRSVNLRYRAPRWRNRHPQACRACGKNAKHNKGYCGPCIQKRDFVDNGYRQYRLPPSLFHRVTTTTSWVNRLSRWAPVTSLSMELVRFDTQAMQNPEISGVEYQQGTLAGYEVREYLLEKWNRKCAYCETSGTPLNIDHIVTRSRGGTNRISNLTLSCRDCNESKGSEDVETWCERHFRRQNGRKIANKVTAQAKALLKDTAAVNSTRWALWRELLKAGLPVETGTGGRTKWNRKRFGVPKSHTLDALCIGNIDSIGSVPNNILIVACIGRGKHQRTTLNKYGFVRSRLPRTKTHHGLRTGDFVRAAVPNGKYKGVHVGRVSIRSSGRVCVSKVDGISYKNCSVLQRADGYGYSREKEALLIPAQEVGVSKAR

SEQ ID NO: 25185 - protein, 445 aa, synthetic construct
LLVLLVHNTKELKSKKGAVYNMVYVISKDGQPLMPMRRHGKVRRLLDSKRAKVVRRDPFTIKLLFETEKTEPSLTLGVDTGSSKIGCAVVTPKKEVLYISEVEIRNDVTTKMERRKVYRRARRDRKTRYRKPRFLNRGNSTKKDRLNPTMISKINSHIREIEFIKSILPIKQIVLETATFDPHLLKMQEENKPFNRHWGYQKGPNYGFGNAKAACLNRDNYTCKCCKTKKGTLHVHHIIYRSNGGADTLDNLITLCEECHKKLHNGELKSFESKLIGKKKGDLKHATQMNIIRSRLLKHYPEAIETFGYITKENRQFIGLGKTHYNDAVVIAMGSLDKPKFKTDVLYKKKHVAKGQYQLHQGQRSEIKLPKGKIRGFLNRDIVNYRGQSYLIKGLMSSGYCILTDIDGVIQKFENPKTVKLNSIERISARNTTRCIRQKIMQNTA

SEQ ID NO: 25186 - protein, 433 aa, synthetic construct; identical to SEQ ID NO: 22039

SEQ ID NO: 25187 - protein, 446 aa, synthetic construct
MEYVYVLDKNGSPLMPTSRCGKVRKLLKNGEAKVVKREPFTIQLLKETTNNTQPISLGVDTGAAYVGATAIGNSKTYYKAEVMLRADIKKKMDNRRQSRKFRRNRKTRYRKPRFLNRGNSIKKDRYSPTLISKFQAHTREIEFVKSILPITQLVLELGQFDPHALKDPSVRNQKWKYQKGVNYGFQNTRHAVLARDNYTCQCCGKRNCRLEVHHIKFKSQGGTNDEENLITLCKECHDGVHASRIELKKKGIKKNIGLAAASQMNVLKCMLQREYQEAEIVYGYQTNVTRELMGLSKSHINDSIAIASMGELDIDTQGQEYKKRVVPVGDRILAKGVRSEKFIPKGKIAGFHRYDKVEYLGEEYFIKGRSKTSPFRLMDIYGNLCTFENKSHYKYAQTKKLKRISARSSVLCTREETTQVETRNNYYLLSSLKIPTFSNNCCIIIL

SEQ ID NO: 25188 - protein, 459 aa, synthetic construct; identical to SEQ ID NO: 10972

SEQ ID NO: 25189 - protein, 462 aa, synthetic construct
MSVLVIGQNGRALMPTTTRKARILLKENKASVVCRHPFTIHLWYKTGCATQEGSIGIDTGSQHIGVGVTCRNKVILKDEHELRSSMEKRSLMETRATMRRGRRYRKVRYRKPKWRHHTKRMYFEKANRKGQHWRKVKTTTQSPRPERWLPPSLQSKCDHHFRIIDRYLKYLPDSITKNLVIEVGRFDMAHMNDPTIHGEMYQRGPMYDTENLRAYIFARDGYKCACCKAKAGSIRKKDGTSVKLVAHHIQFRSRGATDNPKYMISVCDHCHTTKAHQLGGILYSWMETNKKVTRGLRDATFMNILRRRLFDGYPQAAFTYGNITAVDRKRLLLPKSHANDAVAISLFGKDVSVINATCQTLRYKQVRKSKRSLHEATPRKGRKEPNTKAIRNKKNTTHVNGFKLWDSVLVNGQKLFICGFTGSSAYLVDQDGHYVSPPGKTYKQWTLSKLSRLHPNGNWLMA

SEQ ID NO: 25190 - protein, 456 aa, Coprobacillus sp.; identical to SEQ ID NO: 12190
  source 1..456: note = Coprobacillus sp. 3_3_56FAA

SEQ ID NO: 25191 - protein, 467 aa, synthetic construct
MKVFVIGMTGKRLCPTSPSKAKKLLKTGKAHVYRRVPFTIRLDYKTGGSAPPLKLGIDTGEQHIGTAVCNDATVFCKSEIELIKSMEKKKRLEKRKIYRRSRRYRKTRYRHPKFRFRTKRIYVEGGYRKRKGGKMVLRHWKKVPNTVMTNRHEGWLPPSIESKVKHHIDWINRYMDVLPDGTMLGIEVARFDIARMKDPSIRGELYQFGRMYGRENTKAYVLAKFDYTCPICKKKFDRDRKPRMHHVTMRKNAATDNPDEYAPVCVLCHSGEEHLPGGVLDKLAKECRRREYREPTFMNILRRRLFETYPEAEFTYGNITNADRKMLGLEKTHANDAVSIAMHGAKKVIDCEDTVYYRQVHRKKRSLHKATPRKGKKEPNHTAKRNVKNVPYVGKFHINDKVKGPDGNIGFITGLTGSAAYITDFIGEYIYPEGKDYKQHTLSSLRYVHHCGNWITSSVSGAAVSHD

SEQ ID NO: 25192 - protein, 473 aa, synthetic construct
MVAVVTNTGKPLMPTSTYRARKLLKGGRAVIYKYRPYFTIMLVDRAEGEVQDIEYKSDTGSKHAGISACTEKQELLSEQRDLPDKEPEHHKEQQRYRRGRRNRKRYRKPKFDNRKKKPQEGHEKWLAPTNLHKLEIQVNLFKDFCQVVPVTSAYFEMGKFDTQVLKAVLEGRPIPQGEDYQRGEQYGTDTLRAAVFLRDDYTCRICGRTIKDGAILHVHHVGYWMQDRTNRPANLATVCEQCHTPANHGRNGILYGRKPEHGTLKDASYMTSVRWIMLKELKDAAPEVSIHVTYGVTTKRKRQGLHLPKSHVNDAFSMGRFHPKKRADTAYWKKTIRHDRSLQKFYDAVYLDTRDGREKKGSELSNGRISRNHKKDSENLHKYRGHKVSKGHVSIRRDGNKLKPGSVVLYNGERLTVHGTHTSYRKNKKGEEVKNVNVQFTRPASDGKKSASLKKCKIVTRNYNTGWKRYRPA

SEQ ID NO: 25193 - protein, 439 aa, synthetic construct
MSLTYVLDKNGQPLMPTQRCGKVYRLLKSGKAKVVQREPFTIKLLYEPETHIVQDLTLGVDTGSSKIGTAVVDNDANVYYASKVTIRNDISNKMSRRRIYRRARRTRKLRYRPVRFSNRKNSTKKDRFSPTMVSKINSHIREIEFVKSILPVKTLVIETGTFDPHLLEHIEDGIAFNKHWGYQKGSNYGFANSREACLNRDNYTCQCCGAKNTRLEVHHIIYRSKGGSDELVNLITLCEKCHKLLHDGKLKEFESKLSGKRKGILKHATQMNSIRIQLLRHYPEAIETFGFMTKENRQSSDLEKSHVNDAIIISTGCITKPKYKTEVYYKKKCIPRGDYAVTLYAGQGKKNKLGKTTKPRNTRPVYGFRKHDKVEYCNTICFLKSLRFAGNGPLMDIDGNILKFRERYGKADTTSVKNLKRISARKNCLCTKVTFLCTS

SEQ ID NO: 25194 - protein, 494 aa, synthetic construct
  REGION 1..494: note = Engineered IscB
MVFVLDKHKKPLMPCSEKRARLLLKKGRAVVHRLHPFTIRLKDRALEESVVQPLKLKIDPGAKTTGIAVINETDQSRGEVVFLAEIKHKAGIKKAMDTRRSLRHSRRYRKTRYRKPRYQNRKPEKCVSCGRNAKHGSRYCRSCLQTKSFVDNGYRKVRLPVSLEARVTQTFTAVNKLKKLIPLSAIATEHVKFDTQKLQNPEVTGIEYQQGELFGYEVREYLLEKWGRKCAYCGRKNVPLEVEHIVPKSRGGTNRVSNLTLACHDCNQKKGNLTAEEFGYSEVQKQAKQPLKDAAMMNATRWKLYCRLDSRMNTKYDENDKLIREVKVECSTGARTKKQRIEHGLPKTHYYDACCVGTTPNKLVFRTQYVAVWTALGRGTRRMCNPDKYGFPRGHRQRRKFHFGFQTGDIVKAEVPKGKYAGVWMGRVAVRASGGFDLKDASGNRICQGINYRYCRLIQRTDGWQYEKYLRKEGNEADRIPPTTKVVGFLRCVP

SEQ ID NO: 25195 - protein, 529 aa, synthetic construct
  REGION 1..529: note = Engineered IscB
MRYVYVLDVDGKPLMPTCRFGKVRRMLKSGQAKAVDTLPFTIQLTYKPRTRILQPVTLGQDPGRTNIGMAAVRFDGKELGRFHCITRNKEIPKLMADRMAARKASRRGERLARKRLARKLHTTAKHLNGRILPGCSEPIAVKDIINTESRFNNRKRNKCVVCGGNTQSGKNTCRLHKVTDKQNKLKNTYWLTPTATQLLRTHINLFRKLSGILPVTDVAVELNKFAFMQLDNPEMKKREIDFCHGPLCGTGGLEAAVKEQQDGKCLLCGKESIGHYHHIVPRSRRGSNTIANIAGLCPKCHELVHKDADTAESLTEMKTGLMKKYGGTSVLNQIIPKLVETLADLFPGHFHVTNGWNTKEFREKHHLEKDHDVDAYCIACSHLKPEETLVETEPFEILQFRKHNRAIIHHQTERTYKLDGVTVAKNRKKRMEQKTDSLEDWYVDMAKEHGKTQADAMRSRLTVIKSTRYYNTPGRMMPGTVFLYEGKRYVMTGQITNGKYYRAYGQEKRNFPAVKVRILTKNTGLVFVA

SEQ ID NO: 25196 - protein, 703 aa, synthetic construct
  REGION 1..703: note = Engineered IscB
MRYVYVLDVDGKPLMPTCRFGKVRRMLKSGQAKAVDTLPFTIQLTYKPRTRILQPVTLGQDPGRTNIGMAAVRFDGKELGRFHCITRNKEIPKLMADRMAARKASRRGERLARKRLARKLHTTAKHLNGRILPGCSEPIAVKDIINTESRFNNRVPAERIGRDPLDPSQLRASRACLEFQEYRIVAAVANLRIRDGSGSRPLSLEERNAVIEALLAQTERSLTWSDIALEILKLPNESDLTSVPEEDGPSSLAYSQFAPFDETSARIAEFIAKNRRKIPTFAQWWQEQDRTSRSDLVAALADNSGSGLPSGRVAYSRLTLSGLTRVMRDDGVDVHNARKTCFGVDDNWRPPLPAGGGGSGGGGSLTPTATQLLRTHINLFRKLSGILPVTDVAVELNKFAFMQLDNPEMKKREIDFCHGPLCGTGGLEAAVKEQQDGKCLLCGKESIGHYHHIVPRSRRGSNTIANIAGLCPKCHELVHKDADTAESLTEMKTGLMKKYGGTSVLNQIIPKLVETLADLFPGHFHVTNGWNTKEFREKHHLEKDHDVDAYCIACSHLKPEETLVETEPFEILQFRKHNRAIIHHQTERTYKLDGVTVAKNRKKRMEQKTDSLEDWYVDMAKEHGKTQADAMRSRLTVIKSTRYYNTPGRMMPGTVFLYEGKRYVMTGQITNGKYYRAYGQEKRNFPAVKVRILTKNTGLVFVA

SEQ ID NO: 25197 - protein, 637 aa, synthetic construct
  REGION 1..637: note = Engineered IscB
MRYVYVLDVDGKPLMPTCRFGKVRRMLKSGQAKAVDTLPFTIQLTYKPRTRILQPVTLGQDPGRTNIGMAAVRFDGKELGRFHCITRNKEIPKLMADRMAARKASRRGERLARKRLARKLHTTAKHLNGRILPGCSEPIAVKDIINTESRFNNRGRRRCKFVDPQTGEICGWNTPRKANVRDLLLWNICRHLPVSVSEQAGFLAYVNQTNLHRAEILGALPAEEQAPLEAVFSQQRRPKDERLKDRLRRLGVDRHLRSQVTDIVGITSRRPLSGRLSFCREHFLRHHEQSRVPRPSVWLTPTATQLLRTHINLFRKLSGILPVTDVAVELNKFAFMQLDNPEMKKREIDFCHGPLCGTGGLEAAVKEQQDGKCLLCGKESIGHYHHIVPRSRRGSNTIANIAGLCPKCHELVHKDADTAESLTEMKTGLMKKYGGTSVLNQIIPKLVETLADLFPGHFHVTNGWNTKEFREKHHLEKDHDVDAYCIACSHLKPEETLVETEPFEILQFRKHNRAIIHHQTERTYKLDGVTVAKNRKKRMEQKTDSLEDWYVDMAKEHGKTQADAMRSRLTVIKSTRYYNTPGRMMPGTVFLYEGKRYVMTGQITNGKYYRAYGQEKRNFPAVKVRILTKNTGLVFVA

SEQ ID NO: 25198 - protein, 652 aa, synthetic construct
  REGION 1..652: note = Engineered IscB
MRYVYVLDVDGKPLMPTCRFGKVRRMLKSGQAKAVDTLPFTIQLTYKPRTRILQPVTLGQDPGRTNIGMAAVRFDGKELGRFHCITRNKEIPKLMADRMAARKASRRGERLARKRLARKLHTTAKHLNGRILPGCSEPIAVKDIINTESRFNNRGRSRCNWAGCRNNVPRAGHDIQGRLQQCIFLWLQPIFRESNEPERFRKSVDHWVRELAGLAKGHRRSKASTAYRKQINARKRTIYSHVRKRVRREASEETAAQFDSNWSDYYQSNLNNVIEGKDAGRVRYCRQHSAMFVDHIMASEPIPNREDIRDSDLLTPTATQLLRTHINLFRKLSGILPVTDVAVELNKFAFMQLDNPEMKKREIDFCHGPLCGTGGLEAAVKEQQDGKCLLCGKESIGHYHHIVPRSRRGSNTIANIAGLCPKCHELVHKDADTAESLTEMKTGLMKKYGGTSVLNQIIPKLVETLADLFPGHFHVTNGWNTKEFREKHHLEKDHDVDAYCIACSHLKPEETLVETEPFEILQFRKHNRAIIHHQTERTYKLDGVTVAKNRKKRMEQKTDSLEDWYVDMAKEHGKTQADAMRSRLTVIKSTRYYNTPGRMMPGTVFLYEGKRYVMTGQITNGKYYRAYGQEKRNFPAVKVRILTKNTGLVFVA

SEQ ID NO: 25199 - protein, 657 aa, synthetic construct
  REGION 1..657: note = Engineered IscB
MRYVYVLDVDGKPLMPTCRFGKVRRMLKSGQAKAVDTLPFTIQLTYKPRTRILQPVTLGQDPGRTNIGMAAVRFDGKELGRFHCITRNKEIPKLMADRMAARKASRRGERLARKRLARKLHTTAKHLNGRILPGCSEPIAVKDIINTESRFNNRGTSKCQWEGCRRNVPRADHAFKERLQQALFAWLKPVFDVSADPQRLRRSIDHWIAELDGLARWHAKIDKADKEAAKEERESIDKRKRLVYKNLCARVRREAPKGVAEKFQKHWRKKYRRDLTNIVTGKRGGRVPYCREHSQRFVDFFLAGEQIPNRTDVREADLLTPTATQLLRTHINLFRKLSGILPVTDVAVELNKFAFMQLDNPEMKKREIDFCHGPLCGTGGLEAAVKEQQDGKCLLCGKESIGHYHHIVPRSRRGSNTIANIAGLCPKCHELVHKDADTAESLTEMKTGLMKKYGGTSVLNQIIPKLVETLADLFPGHFHVTNGWNTKEFREKHHLEKDHDVDAYCIACSHLKPEETLVETEPFEILQFRKHNRAIIHHQTERTYKLDGVTVAKNRKKRMEQKTDSLEDWYVDMAKEHGKTQADAMRSRLTVIKSTRYYNTPGRMMPGTVFLYEGKRYVMTGQITNGKYYRAYGQEKRNFPAVKVRILTKNTGLVFVA

SEQ ID NO: 25200 - protein, 598 aa, synthetic construct
  REGION 1..598: note = Engineered IscB
MRYVYVLDVDGKPLMPTCRFGKVRRMLKSGQAKAVDTLPFTIQLTYKPRTRILQPVTLGQDPGRTNIGMAAVRFDGKELGRFHCITRNKEIPKLMADRMAARKASRRGERLARKRLARKLHTTAKHLNGRILPGCSEPIAVKDIINTESRFNNRILTKCKVCGKNTPLRRNVRELLLENIVRFLPLESELKETLKRTILEGQQGNINKLFRKLKFNQKDWPGKNLTDIAKNKLPGRLPFCKEHFAENEKFTTIEKSTFRLTPTATQLLRTHINLFRKLSGILPVTDVAVELNKFAFMQLDNPEMKKREIDFCHGPLCGTGGLEAAVKEQQDGKCLLCGKESIGHYHHIVPRSRRGSNTIANIAGLCPKCHELVHKDADTAESLTEMKTGLMKKYGGTSVLNQIIPKLVETLADLFPGHFHVTNGWNTKEFREKHHLEKDHDVDAYCIACSHLKPEETLVETEPFEILQFRKHNRAIIHHQTERTYKLDGVTVAKNRKKRMEQKTDSLEDWYVDMAKEHGKTQADAMRSRLTVIKSTRYYNTPGRMMPGTVFLYEGKRYVMTGQITNGKYYRAYGQEKRNFPAVKVRILTKNTGLVFVA

SEQ ID NO: 25201 - protein, 597 aa, synthetic construct
  REGION 1..597: note = Engineered IscB
MRYVYVLDVDGKPLMPTCRFGKVRRMLKSGQAKAVDTLPFTIQLTYKPRTRILQPVTLGQDPGRTNIGMAAVRFDGKELGRFHCITRNKEIPKLMADRMAARKASRRGERLARKRLARKLHTTAKHLNGRILPGCSEPIAVKDIINTESRFNNRILTKCKICGKNTPLKRNVRDLLIENILMDLPVTEEQKQFIRNNALTEDGKERLKPFFRRVHINEFLRKQTYDIAEGKLSGRTVFCKDHMLEHHKFTKVPKTTVRLTPTATQLLRTHINLFRKLSGILPVTDVAVELNKFAFMQLDNPEMKKREIDFCHGPLCGTGGLEAAVKEQQDGKCLLCGKESIGHYHHIVPRSRRGSNTIANIAGLCPKCHELVHKDADTAESLTEMKTGLMKKYGGTSVLNQIIPKLVETLADLFPGHFHVTNGWNTKEFREKHHLEKDHDVDAYCIACSHLKPEETLVETEPFEILQFRKHNRAIIHHQTERTYKLDGVTVAKNRKKRMEQKTDSLEDWYVDMAKEHGKTQADAMRSRLTVIKSTRYYNTPGRMMPGTVFLYEGKRYVMTGQITNGKYYRAYGQEKRNFPAVKVRILTKNTGLVFVA

SEQ ID NO: 25202 - protein, 604 aa, synthetic construct
  REGION 1..604: note = Engineered IscB
MRYVYVLDVDGKPLMPTCRFGKVRRMLKSGQAKAVDTLPFTIQLTYKPRTRILQPVTLGQDPGRTNIGMAAVRFDGKELGRFHCITRNKEIPKLMADRMAARKASRRGERLARKRLARKLHTTAKHLNGRILPGCSEPIAVKDIINTESRFNNRILTKCKVCGKNTPLRINVRELLLENIVRYLPLQNKERELLKLTILKGHQQDINEIFKHFRKVYKITLNQKDWPGKNLIDIARNQLRGRLLFCKVHFPENEKYVSIEKKTFRLTPTATQLLRTHINLFRKLSGILPVTDVAVELNKFAFMQLDNPEMKKREIDFCHGPLCGTGGLEAAVKEQQDGKCLLCGKESIGHYHHIVPRSRRGSNTIANIAGLCPKCHELVHKDADTAESLTEMKTGLMKKYGGTSVLNQIIPKLVETLADLFPGHFHVTNGWNTKEFREKHHLEKDHDVDAYCIACSHLKPEETLVETEPFEILQFRKHNRAIIHHQTERTYKLDGVTVAKNRKKRMEQKTDSLEDWYVDMAKEHGKTQADAMRSRLTVIKSTRYYNTPGRMMPGTVFLYEGKRYVMTGQITNGKYYRAYGQEKRNFPAVKVRILTKNTGLVFVA

SEQ ID NO: 25203 - protein, 598 aa, synthetic construct; identical to SEQ ID NO: 25200
  REGION 1..598: note = Engineered IscB

SEQ ID NO: 25204 - protein, 640 aa, synthetic construct
  REGION 1..640: note = Engineered IscB
MRYVYVLDVDGKPLMPTCRFGKVRRMLKSGQAKAVDTLPFTIQLTYKPRTRILQPVTLGQDPGRTNIGMAAVRFDGKELGRFHCITRNKEIPKLMADRMAARKASRRGERLARKRLARKLHTTAKHLNGRILPGCSEPIAVKDIINTESRFNNRPKRKCKYVDPKTGEVCGANTPRKEKVRDLLLWDICQHLPVEPEQRLAILSYVNQVNIVRPEVLACLALEERALLENHRALARASKSKPLPQLLCELKIKKQLQSQILAIASGDPERKAADLKGRMAFCRKHFLLHHQQTRIPKPSAWLTPTATQLLRTHINLFRKLSGILPVTDVAVELNKFAFMQLDNPEMKKREIDFCHGPLCGTGGLEAAVKEQQDGKCLLCGKESIGHYHHIVPRSRRGSNTIANIAGLCPKCHELVHKDADTAESLTEMKTGLMKKYGGTSVLNQIIPKLVETLADLFPGHFHVTNGWNTKEFREKHHLEKDHDVDAYCIACSHLKPEETLVETEPFEILQFRKHNRAIIHHQTERTYKLDGVTVAKNRKKRMEQKTDSLEDWYVDMAKEHGKTQADAMRSRLTVIKSTRYYNTPGRMMPGTVFLYEGKRYVMTGQITNGKYYRAYGQEKRNFPAVKVRILTKNTGLVFVA

SEQ ID NO: 25205 - protein, 692 aa, synthetic construct
  REGION 1..692: note = Engineered IscB
MRYVYVLDVDGKPLMPTCRFGKVRRMLKSGQAKAVDTLPFTIQLTYKPRTRILQPVTLGQDPGRTNIGMAAVRFDGKELGRFHCITRNKEIPKLMADRMAARKASRRGERLARKRLARKLHTTAKHLNGRILPGCSEPIAVKDIINTESRFNNRSASSRVGKDPLQPGKNRALKASDAFQRYRIAALIGNLRVRVDGEKRILSVEEKNLVFDHLVNLTPKKEPEWVTIAEILGIDRGQLIGTATMTDDGERAGARPPTHDTNRSIVNSRIAPLVDWWKTASALEQHAMVKALGSGHLPVGRAAYSEDTLVRLTRRMLSDGVDLYTARLQEFGIEPSWTPPTPRGGGGSGGGGSLTPTATQLLRTHINLFRKLSGILPVTDVAVELNKFAFMQLDNPEMKKREIDFCHGPLCGTGGLEAAVKEQQDGKCLLCGKESIGHYHHIVPRSRRGSNTIANIAGLCPKCHELVHKDADTAESLTEMKTGLMKKYGGTSVLNQIIPKLVETLADLFPGHFHVTNGWNTKEFREKHHLEKDHDVDAYCIACSHLKPEETLVETEPFEILQFRKHNRAIIHHQTERTYKLDGVTVAKNRKKRMEQKTDSLEDWYVDMAKEHGKTQADAMRSRLTVIKSTRYYNTPGRMMPGTVFLYEGKRYVMTGQITNGKYYRAYGQEKRNFPAVKVRILTKNTGLVFVA

SEQ ID NO: 25206 - protein, 672 aa, synthetic construct
  REGION 1..672: note = Engineered IscB
MRYVYVLDVDGKPLMPTCRFGKVRRMLKSGQAKAVDTLPFTIQLTYKPRTRILQPVTLGQDPGRTNIGMAAVRFDGKELGRFHCITRNKEIPKLMADRMAARKASRRGERLARKRLARKLHTTAKHLNGRILPGCSEPIAVKDIINTESRFNNRDFSHLVGNCSFFTDEKRAPKNSPLAFMFVALTRIINLLNNLKNTEGILYTKDDLNALLNEVLKNGTLTYKQTKKLLGLSDDYEFKGEKGTYFIEFKKYKEFIKALGEHNLSQDDLNEIAKDIGSGFKDHLNISFKALKLVTPLMLEGKKYDEACNELNLKVAINEDKKDGGGGSGGGGSLTPTATQLLRTHINLFRKLSGILPVTDVAVELNKFAFMQLDNPEMKKREIDFCHGPLCGTGGLEAAVKEQQDGKCLLCGKESIGHYHHIVPRSRRGSNTIANIAGLCPKCHELVHKDADTAESLTEMKTGLMKKYGGTSVLNQIIPKLVETLADLFPGHFHVTNGWNTKEFREKHHLEKDHDVDAYCIACSHLKPEETLVETEPFEILQFRKHNRAIIHHQTERTYKLDGVTVAKNRKKRMEQKTDSLEDWYVDMAKEHGKTQADAMRSRLTVIKSTRYYNTPGRMMPGTVFLYEGKRYVMTGQITNGKYYRAYGQEKRNFPAVKVRILTKNTGLVFVA

SEQ ID NO: 25207 - protein, 895 aa, synthetic construct
  REGION 1..895: note = Engineered IscB
MRYVYVLDVDGKPLMPTCRFGKVRRMLKSGQAKAVDTLPFTIQLTYKPRTRILQPVTLGQDPGRTNIGMAAVRFDGKELGRFHCITRNKEIPKLMADRMAARKASRRGERLARKRLARKLHTTAKHLNGRILPGCSEPIAVKDIINTESRFNNRKPPKCQSLILNPKFLDNQYPNWQQYLQELKKLQSIQNYLDSFETDLKVLKSSKDQPYFVEYKSSNQQIASGQRDYKDLDARILQFIFDRVKASDELLLNEIYFQAKKLKQKASSELEKLESSKKLDEVIANSQLSQILKSQHTNGIFEQGTFLHLVCKYYKQRQRARDSRLYIMPEYRYDKKLHKYNNTGRFDDDNQLLTYCNHKPRQKRYQLLNDLAGVLQVSPNFLKDKIGSDDDLFISKWLVEHIRGFKKACEDSLKIQKDNRGLLNHKINIARNTKGKCEKEIFNLICKIEGSEDKKGNYKHGLAYELGVLLFGEPNEASKPEFDRKIKKFNSIYSFAQIQQIAFAERKGNANTCAVCSADNAHRMQQIKITEPVEDNKDKIILSAKAQRLPAIPTRILTPTATQLLRTHINLFRKLSGILPVTDVAVELNKFAFMQLDNPEMKKREIDFCHGPLCGTGGLEAAVKEQQDGKCLLCGKESIGHYHHIVPRSRRGSNTIANIAGLCPKCHELVHKDADTAESLTEMKTGLMKKYGGTSVLNQIIPKLVETLADLFPGHFHVTNGWNTKEFREKHHLEKDHDVDAYCIACSHLKPEETLVETEPFEILQFRKHNRAIIHHQTERTYKLDGVTVAKNRKKRMEQKTDSLEDWYVDMAKEHGKTQADAMRSRLTVIKSTRYYNTPGRMMPGTVFLYEGKRYVMTGQITNGKYYRAYGQEKRNFPAVKVRILTKNTGLVFVA

SEQ ID NO: 25208 - protein, 875 aa, synthetic construct
  REGION 1..875: note = Engineered IscB
MRYVYVLDVDGKPLMPTCRFGKVRRMLKSGQAKAVDTLPFTIQLTYKPRTRILQPVTLGQDPGRTNIGMAAVRFDGKELGRFHCITRNKEIPKLMADRMAARKASRRGERLARKRLARKLHTTAKHLNGRILPGCSEPIAVKDIINTESRFNNRKPPKCQSLILNPKFLDNQYPNWQQYLQELKKLQSIQNYLDSFETDLKVLKSSKDQPYFVEYKSSNQQIASGQRDYKDLDARILQFIFDRVKASDELLLNEIYFQAKKLKQKASSELEKLESSKKLDEVIANSQLSQILKSQHTNGIFEQGTFLHLVCKYYKQRQRARDSGGSGGGSGLLTYCNHKPRQKRYQLLNDLAGVLQVSPNFLKDKIGSDDDLFISKWLVEHIRGFKKACEDSLKIQKDNRGLLNHKINIARNTKGKCEKEIFNLICKIEGSEDKKGNYKHGLAYELGVLLFGEPNEASKPEFDRKIKKFNSIYSFAQIQQIAFAERKGNANTCAVCSADNAHRMQQIKITEPVEDNKDKIILSAKAQRLPAIPTRILTPTATQLLRTHINLFRKLSGILPVTDVAVELNKFAFMQLDNPEMKKREIDFCHGPLCGTGGLEAAVKEQQDGKCLLCGKESIGHYHHIVPRSRRGSNTIANIAGLCPKCHELVHKDADTAESLTEMKTGLMKKYGGTSVLNQIIPKLVETLADLFPGHFHVTNGWNTKEFREKHHLEKDHDVDAYCIACSHLKPEETLVETEPFEILQFRKHNRAIIHHQTERTYKLDGVTVAKNRKKRMEQKTDSLEDWYVDMAKEHGKTQADAMRSRLTVIKSTRYYNTPGRMMPGTVFLYEGKRYVMTGQITNGKYYRAYGQEKRNFPAVKVRILTKNTGLVFVA

SEQ ID NO: 25209 - protein, 673 aa, synthetic construct
  REGION 1..673: note = Engineered IscB
MRYVYVLDVDGKPLMPTCRFGKVRRMLKSGQAKAVDTLPFTIQLTYKPRTRILQPVTLGQDPGRTNIGMAAVRFDGKELGRFHCITRNKEIPKLMADRMAARKASRRGERLARKRLARKLHTTAKHLNGRILPGCSEPIAVKDIINTESRFNNRKPPKCQSLILNPKFLDNQYPNWQQYLQELKKLQSIQNYLDSFETDLKVLKSSKDQPYFVEYKSSNQQIASGQRDYKDLDARILQFIFDRVKASDELLLNEIYFQAKKLKQKASSELEKLESSKKLDEVIANSQLSQILKSQHTNGIFEQGTFLHLVCKYYKQRQRARDSRGGGGSGGGGSLTPTATQLLRTHINLFRKLSGILPVTDVAVELNKFAFMQLDNPEMKKREIDFCHGPLCGTGGLEAAVKEQQDGKCLLCGKESIGHYHHIVPRSRRGSNTIANIAGLCPKCHELVHKDADTAESLTEMKTGLMKKYGGTSVLNQIIPKLVETLADLFPGHFHVTNGWNTKEFREKHHLEKDHDVDAYCIACSHLKPEETLVETEPFEILQFRKHNRAIIHHQTERTYKLDGVTVAKNRKKRMEQKTDSLEDWYVDMAKEHGKTQADAMRSRLTVIKSTRYYNTPGRMMPGTVFLYEGKRYVMTGQITNGKYYRAYGQEKRNFPAVKVRILTKNTGLVFVA

SEQ ID NO: 25210 - protein, 555 aa, synthetic construct
  REGION 1..555: note = Engineered IscB
MRYVYVLDVDGKPLMPTCRFGKVRRMLKSGQAKAVDTLPFTIQLTYKPRTRILQPVTLGQDPGRTNIGMAAVRFDGKELGRFHCITRNKEIPKLMADRMAARKASRRGERLARKRLARKLHTTAKHLNGRILPGCSEPIAVKDIINTESRFNNRLRPEGWLTPTATQLLRTHINLFRKLSGILPVTDVAVETAREVGKSFKDRKEIEKRQEENRKDREKAAAKFREYFPNFVGEPKSKDILKLRLYEQQHGKCLYSGKEINLGRLNEKGYVEIDHALPFSRTWDDSFNNKVLVLGSENQNKGNQTPYEYFNGKDNSREWQEFKARVETSRFPRSKKQRILLQKFDEDGFKERNLSVLNQIIPKLVETLADLFPGHFHVTNGWNTKEFREKHHLEKDHDVDAYCIACSHLKPEETLVETEPFEILQFRKHNRAIIHHQTERTYKLDGVTVAKNRKKRMEQKTDSLEDWYVDMAKEHGKTQADAMRSRLTVIKSTRYYNTPGRMMPGTVFLYEGKRYVMTGQITNGKYYRAYGQEKRNFPAVKVRILTKNTGLVFVA

SEQ ID NO: 25211 - protein, 691 aa, synthetic construct
  REGION 1..691: note = Engineered IscB
MRYVYVLDVDGKPLMPTCRFGKVRRMLKSGQAKAVDTLPFTIQLTYKPRTRILQPVTLGQDPGRTNIGMAAVRFDGKELGRFHCITRNKEIPKLMADRMAARKASRRGERLARKRLARKLHTTAKHLNGRILPGCSEPIAVKDIINTESRFNNRSGDAVQKMLGHCTFEPAEPKAAKNTYTAERFIWLTKLNNLRILEQGSERPLTDTERATLMDEPYRKSKLTYAQARKLLGLEDTAFFKGLRYGKDNAEASTLMEMKAYHAISRALEKEGLKDKKSPLNLSPELQDEIGTAFGSGFDKFVQISLKALRRIVPLMEQGKRYDEACAEIYGDHYGKKNTEEKGGGGSGGGGSLTPTATQLLRTHINLFRKLSGILPVTDVAVELNKFAFMQLDNPEMKKREIDFCHGPLCGTGGLEAAVKEQQDGKCLLCGKESIGHYHHIVPRSRRGSNTIANIAGLCPKCHELVHKDADTAESLTEMKTGLMKKYGGTSVLNQIIPKLVETLADLFPGHFHVTNGWNTKEFREKHHLEKDHDVDAYCIACSHLKPEETLVETEPFEILQFRKHNRAIIHHQTERTYKLDGVTVAKNRKKRMEQKTDSLEDWYVDMAKEHGKTQADAMRSRLTVIKSTRYYNTPGRMMPGTVFLYEGKRYVMTGQITNGKYYRAYGQEKRNFPAVKVRILTKNTGLVFVA

SEQ ID NO: 25212 - protein, 537 aa, synthetic construct
  REGION 1..537: note = Engineered IscB
MRYVYVLDVDGKPLMPTCRFGKVRRMLKSGQAKAVDTLPFTIQLTYKPRTRILQPVTLGQDPGRTNIGMAAVRFDGKELGRFHCITRNKEIPKLMADRMAARKASRRGERLARKRLARKLHTTAKHLNGRILPGCSEPIAVKDIINTESRFNNRLRPEGWLTPTATQLLRTHINLFRKLSGILPVTDVAVELNKFAFMQLDNPEMKKREIDFCHGPLCGTGGLEAAVKEQQDGKCLLCGKESIGHYHHIVPRSRRGSNTIANIAGLCPKCHELVHKDADTAESLTEMKTGLMKKYGGTSVLNQIIPKLVETLADLFPGHFHVTNGWNTKEFREKHHLEKDHDVDAYCIACSTVAMQQKITRFVRYKEMNAFDGKTIDKETGEVLHQKTHFPQPWETLVETEPFEILQFRKHNRAIIHHQTERTYKLDGVTVAKNRKKRMEQKTDSLEDWYVDMAKEHGKTQADAMRSRLTVIKSTRYYNTPGRMMPGTVFLYEGKRYVMTGQITNGKYYRAYGQEKRNFPAVKVRILTKNTGLVFVA

SEQ ID NO: 25213 - protein, 530 aa, synthetic construct
  REGION 1..530: note = Engineered IscB
MRYVYVLDVDGKPLMPTCRFGKVRRMLKSGQAKAVDTLPFTIQLTYKPRTRILQPVTLGQDPGRTNIGMAAVRFDGKELGRFHCITRNKEIPKLMADRMAARKASRRGERLARKRLARKLHTTAKHLNGRILPGCSEPIAVKDIINTESRFNNRKPEKCVSCGRNAKHGSRYCRSCLQTKSFVDNGYRKVRLTPTATQLLRTHINLFRKLSGILPVTDVAVELNKFAFMQLDNPEMKKREIDFCHGPLCGTGGLEAAVKEQQDGKCLLCGKESIGHYHHIVPRSRRGSNTIANIAGLCPKCHELVHKDADTAESLTEMKTGLMKKYGGTSVLNQIIPKLVETLADLFPGHFHVTNGWNTKEFREKHHLEKDHDVDAYCIACSHLKPEETLVETEPFEILQFRKHNRAIIHHQTERTYKLDGVTVAKNRKKRMEQKTDSLEDWYVDMAKEHGKTQADAMRSRLTVIKSTRYYNTPGRMMPGTVFLYEGKRYVMTGQITNGKYYRAYGQEKRNFPAVKVRILTKNTGLVFVA

SEQ ID NO: 25214 - protein, 681 aa, synthetic construct
  REGION 1..681: note = Engineered IscB
MRYVYVLDVDGKPLMPTCRFGKVRRMLKSGQAKAVDTLPFTIQLTYKPRTRILQPVTLGQDPGRTNIGMAAVRFDGKELGRFHCITRNKEIPKLMADRMAARKASRRGERLARKRLARKLHTTAKHLNGRILPGCSEPIAVKDIINTESRFNNRLRYEMLMGHCTYFPEELRSVKYAYNADLYNALNDLNNLVITRDENEKLEYYEKFQIIENVFKQKKKPTLKQIAKEILVNEEDIKGYRVTSTGKPEFTNLKVYHDIKDITARKEIIENAELLDQIAKILGSGYTGTHNLSLKAINLILDELWHTNDNQIAIFNRLKLVPKKVDLSQQKGGGGSGGGGSWLTPTATQLLRTHINLFRKLSGILPVTDVAVELNKFAFMQLDNPEMKKREIDFCHGPLCGTGGLEAAVKEQQDGKCLLCGKESIGHYHHIVPRSRRGSNTIANIAGLCPKCHELVHKDADTAESLTEMKTGLMKKYGGTSVLNQIIPKLVETLADLFPGHFHVTNGWNTKEFREKHHLEKDHDVDAYCIACSHLKPEETLVETEPFEILQFRKHNRAIIHHQTERTYKLDGVTVAKNRKKRMEQKTDSLEDWYVDMAKEHGKTQADAMRSRLTVIKSTRYYNTPGRMMPGTVFLYEGKRYVMTGQITNGKYYRAYGQEKRNFPAVKVRILTKNTGLVFVA

SEQ ID NO: 25215 - protein, 704 aa, synthetic construct
  REGION 1..704: note = Engineered IscB
MRYVYVLDVDGKPLMPTCRFGKVRRMLKSGQAKAVDTLPFTIQLTYKPRTRILQPVTLGQDPGRTNIGMAAVRFDGKELGRFHCITRNKEIPKLMADRMAARKASRRGERLARKRLARKLHTTAKHLNGRILPGCSEPIAVKDIINTESRFNNRLRIERMTNFDKNLPNEKVLPKHSLLYEYFTVYNELTKVKYVTEGMRKPAFLSGEQKKAIVDLLFKTNRKVTVKQLKEDYFKKIECFDSVEISGVEDRFNASLGTYHDLLKIIKDKDFLDNEENEDILEDIVLTLGSGTGWGRLSRKLINGIRDKQSGKTILDFLKSDGFANRNFMQLIHDDSLTFKEDIQKAQVSGQGDSGGGGSGGGGSWLTPTATQLLRTHINLFRKLSGILPVTDVAVELNKFAFMQLDNPEMKKREIDFCHGPLCGTGGLEAAVKEQQDGKCLLCGKESIGHYHHIVPRSRRGSNTIANIAGLCPKCHELVHKDADTAESLTEMKTGLMKKYGGTSVLNQIIPKLVETLADLFPGHFHVTNGWNTKEFREKHHLEKDHDVDAYCIACSHLKPEETLVETEPFEILQFRKHNRAIIHHQTERTYKLDGVTVAKNRKKRMEQKTDSLEDWYVDMAKEHGKTQADAMRSRLTVIKSTRYYNTPGRMMPGTVFLYEGKRYVMTGQITNGKYYRAYGQEKRNFPAVKVRILTKNTGLVFVA

SEQ ID NO: 25216 - protein, 511 aa, synthetic construct
  REGION 1..511: note = Engineered IscB
MRYVYVLDVDGKPLMPTCRFGKVRRMLKSGQAKAVDTLPFTIQLTYKPRTRILQPVTLGQDPGRTNIGMAAVRFDGKELGRFHCITRNKEIPKLMADRMAARKASRRGERLARKRLARKLHTTAKHLNGRILPGCSEPIAVKDIINTESRFNNRLRPEGWLTPTATQLLRTHINLFRKLSGILPVTDVAVELNKFAFMQLDNPEMKKREIDFCHGPLCGTGGLEAAVKEQQDGKCLLCGKESIGHYHHIVPRSRRGSNTIANIAGLCPKCHELVHKDADTAESLTEMKTGLMKKYGGTSVLNQIIPKLVETLDSRMNTKYDENDKLIREVKFHVTNGWNTKEFREKHHLEKDHDVDAYCIACSHLKPEETLVETEPFEILQFRKHNRAIIHHQTERTYKLDGVTVAKNRKKRMEQKTDSLEDWYVDMAKEHGKTQADAMRSRLTVIKSTRYYNTPGRMMPGTVFLYEGKRYVMTGQITNGKYYRAYGQEKRNFPAVKVRILTKNTGLVFVA

SEQ ID NO: 25217 - protein, 567 aa, synthetic construct
  REGION 1..567: note = Engineered IscB
MRYVYVLDVDGKPLMPTCRFGKVRRMLKSGQAKAVDTLPFTIQLTYKPRTRILQPVTLGQDPGRTNIGMAAVRFDGKELGRFHCITRNKEIPKLMADRMAARKASRRGERLARKRLARKLHTTAKHLNGRILPGCSEPIAVKDIINTESRFNNRLRPEGWLTPTATQLLRTHINLFRKLSGILPVTDVAVEMARETNEDDEKKAIQKIQKANKDEKDAAMLKAANQYNGKAELPHSVFHGHKQLATKIRLWHQQGERCLYTGKTISIHDLINNSNQFEVDHILPLSITFDDSLANKVLVYATANQEKGQRTPYQALDSMDDAWSFRELKAFVRESKTLSNKKKEYLLTEEDISKFDVRKKFIERNLSVLNQIIPKLVETLADLFPGHFHVTNGWNTKEFREKHHLEKDHDVDAYCIACSHLKPEETLVETEPFEILQFRKHNRAIIHHQTERTYKLDGVTVAKNRKKRMEQKTDSLEDWYVDMAKEHGKTQADAMRSRLTVIKSTRYYNTPGRMMPGTVFLYEGKRYVMTGQITNGKYYRAYGQEKRNFPAVKVRILTKNTGLVFVA

SEQ ID NO: 25218 - protein, 685 aa, synthetic construct
  REGION 1..685: note = Engineered IscB
MRYVYVLDVDGKPLMPTCRFGKVRRMLKSGQAKAVDTLPFTIQLTYKPRTRILQPVTLGQDPGRTNIGMAAVRFDGKELGRFHCITRNKEIPKLMADRMAARKASRRGERLARKRLARKLHTTAKHLNGRILPGCSEPIAVKDIINTESRFNNRLRGIWIGKCTFYPDEFRAAKASYTAQEFNLLNDLNNLTVPTETKKLSKEQKNQIINYVKNEKAMGPAKLFKYIAKLLSCDVADIKGYRIDKSGKAEIHTFEAYRKMKTLETLDIEQMDRETLDKLAYVLGSGSSIFGKGWHNFSVKLMMELIPELYETSEEQMTILTRLGKQKTTSSSNKTKGGGGSGGGGSLTPTATQLLRTHINLFRKLSGILPVTDVAVELNKFAFMQLDNPEMKKREIDFCHGPLCGTGGLEAAVKEQQDGKCLLCGKESIGHYHHIVPRSRRGSNTIANIAGLCPKCHELVHKDADTAESLTEMKTGLMKKYGGTSVLNQIIPKLVETLADLFPGHFHVTNGWNTKEFREKHHLEKDHDVDAYCIACSHLKPEETLVETEPFEILQFRKHNRAIIHHQTERTYKLDGVTVAKNRKKRMEQKTDSLEDWYVDMAKEHGKTQADAMRSRLTVIKSTRYYNTPGRMMPGTVFLYEGKRYVMTGQITNGKYYRAYGQEKRNFPAVKVRILTKNTGLVFVA

SEQ ID NO: 25219 - protein, 707 aa, synthetic construct
  REGION 1..707: note = Engineered IscB
MRYVYVLDVDGKPLMPTCRFGKVRRMLKSGQAKAVDTLPFTIQLTYKPRTRILQPVTLGQDPGRTNIGMAAVRFDGKELGRFHCITRNKEIPKLMADRMAARKASRRGERLARKRLARKLHTTAKHLNGRILPGCSEPIAVKDIINTESRFNNRPKRKCKYVDPKTGEVCGANTPRKEKVRDLLLWDICQHLPVEPEQRLAILSYVNQVNIVRPEVLACLALEERALLENHRALARASKSKPLPQLLCELKIKKQLQSQILAIASGDPERKAADLKGRMAFCRKHFLLHHQQTRIPKPSAWLTPTATQLLRTHINLFRKLSGILPVTDVAVELNKFAFMQLDNPEMKKREIDFCHGPLCGTGGLEAAVKEQQDGKCLLCGKESIGHYHHIVPRSRRGSNTIANIAGLCPKCHELVHKDADTAESLTEMKTGLMKKYGGTSVLNQIIPKLVETLADLFPGHFHVTNGWNTKEFREKHHLEKDHDVDAYCIACSHLKPEETLVETEPFAPTSGGKQLFDTNPLSKRPEGRFAQSKAIVCEQGTLAFKDVAKVENPRKRATLQRVADEATAAAKARGETPPTAFTAEMLPKIPFKSVRLAKQDASDTNTRRLGRHWFKVASAVNIATIVYQLDGKVCMQLQRNPAVFRHDPGLPQGARVVATFRKGDLVECDAGRGRVTKNHSNCTLTVELLDSGKEVTRLAKSFRPRHG

SEQ ID NO: 25220 - protein, 729 aa, synthetic construct
  REGION 1..729: note = Engineered IscB
MRYVYVLDVDGKPLMPTCRFGKVRRMLKSGQAKAVDTLPFTIQLTYKPRTRILQPVTLGQDPGRTNIGMAAVRFDGKELGRFHCITRNKEIPKLMADRMAARKASRRGERLARKRLARKLHTTAKHLNGRILPGCSEPIAVKDIINTESRFNNRPKRKCKYVDPKTGEVCGANTPRKEKVRDLLLWDICQHLPVEPEQRLAILSYVNQVNIVRPEVLACLALEERALLENHRALARASKSKPLPQLLCELKIKKQLQSQILAIASGDPERKAADLKGRMAFCRKHFLLHHQQTRIPKPSAWLTPTATQLLRTHINLFRKLSGILPVTDVAVELNKFAFMQLDNPEMKKREIDFCHGPLCGTGGLEAAVKEQQDGKCLLCGKESIGHYHHIVPRSRRGSNTIANIAGLCPKCHELVHKDADTAESLTEMKTGLMKKYGGTSVLNQIIPKLVETLADLFPGHFHVTNGWNTKEFREKHHLEKDHDVDAYCIACSHLKPEETLVETEPANSDGREFDPEKHIKESEEFKRNKGSRGSALYDKNPLSIKNGKIARRYMVTEIERGKEDAVISEEWREKLKEAFDRFGVSNGKCLTDLQTKEVGLYGQKNPMSLKCAVRGAGKGQIVLIGNNAFKTNVHNVGVAVYLDEKGKKRACELKNQRLAKHFVEPQDEIKGKILFTLRKGDTVKAEDGNIYRILELGERPVVDIKWVPTSDGKKKRVKTAIHATKLTKL

SEQ ID NO: 25221 - protein, 711 aa, synthetic construct
  REGION 1..711: note = Engineered IscB
MRYVYVLDVDGKPLMPTCRFGKVRRMLKSGQAKAVDTLPFTIQLTYKPRTRILQPVTLGQDPGRTNIGMAAVRFDGKELGRFHCITRNKEIPKLMADRMAARKASRRGERLARKRLARKLHTTAKHLNGRILPGCSEPIAVKDIINTESRFNNRPKRKCKYVDPKTGEVCGANTPRKEKVRDLLLWDICQHLPVEPEQRLAILSYVNQVNIVRPEVLACLALEERALLENHRALARASKSKPLPQLLCELKIKKQLQSQILAIASGDPERKAADLKGRMAFCRKHFLLHHQQTRIPKPSAWLTPTATQLLRTHINLFRKLSGILPVTDVAVELNKFAFMQLDNPEMKKREIDFCHGPLCGTGGLEAAVKEQQDGKCLLCGKESIGHYHHIVPRSRRGSNTIANIAGLCPKCHELVHKDADTAESLTEMKTGLMKKYGGTSVLNQIIPKLVETLADLFPGHFHVTNGWNTKEFREKHHLEKDHDVDAYCIACSHLKPEETLVETEPDIEPEKMEKKDYLIEFRAKQDRKSSQLHDQNPVSSKNGIITQRKMVTEIKRGKENRIVNGEYRKKVILLFDKYDIKNGKCPNDKQARELGCKRLKCYVIGTGPSQLAKLKNNHYKVATPNDSVIVAKDNSGNTHVILRKNRYLRKHMQKEQVPDGFIIDKVFRRGDQVADSKGDIFIVKKLGKSLVIANREGVEKTKTPKALKPLN

SEQ ID NO: 25222 - protein, 733 aa, synthetic construct
  REGION 1..733: note = Engineered IscB
MRYVYVLDVDGKPLMPTCRFGKVRRMLKSGQAKAVDTLPFTIQLTYKPRTRILQPVTLGQDPGRTNIGMAAVRFDGKELGRFHCITRNKEIPKLMADRMAARKASRRGERLARKRLARKLHTTAKHLNGRILPGCSEPIAVKDIINTESRFNNRPKRKCKYVDPKTGEVCGANTPRKEKVRDLLLWDICQHLPVEPEQRLAILSYVNQVNIVRPEVLACLALEERALLENHRALARASKSKPLPQLLCELKIKKQLQSQILAIASGDPERKAADLKGRMAFCRKHFLLHHQQTRIPKPSAWLTPTATQLLRTHINLFRKLSGILPVTDVAVELNKFAFMQLDNPEMKKREIDFCHGPLCGTGGLEAAVKEQQDGKCLLCGKESIGHYHHIVPRSRRGSNTIANIAGLCPKCHELVHKDADTAESLTEMKTGLMKKYGGTSVLNQIIPKLVETLADLFPGHFHVTNGWNTKEFREKHHLEKDHDVDAYCIACSHLKPEETLVETEPCGEDGKEFDIERHLSEMKEFRRDKGGKSAPLHDRNPLSFKNDIITRRFMVTEIECGKEAVIISEEYRKKLTEAFKRFGIAKGKYLTDEQAKDAGFYLRKNGEGVMSLKCEVKGTGYNQMIRIKNNIFKTNVHNVGVAVFLDEKGKKRACELKNPRLSKHFVKPAEQVKGKVIFILKRGNMVTVEGEEMIYRVKKLGTSPVIEAIVGSDGKTRTVSATKLLKINHTKKV

SEQ ID NO: 25223 - protein, 656 aa, synthetic construct
  REGION 1..656: note = Engineered IscB
MRYVYVLDVDGKPLMPTCRFGKVRRMLKSGQAKAVDTLPFTIQLTYKPRTRILQPVTLGQDPGRTNIGMAAVRFDGKELGRFHCITRNKEIPKLMADRMAARKASRRGERLARKRLARKLHTTAKHLNGRILPGCSEPIAVKDIINTESRFNNRPKRKCKYVDPKTGEVCGANTPRKEKVRDLLLWDICQHLPVEPEQRLAILSYVNQVNIVRPEVLACLALEERALLENHRALARASKSKPLPQLLCELKIKKQLQSQILAIASGDPERKAADLKGRMAFCRKHFLLHHQQTRIPKPSAWLTPTATQLLRTHINLFRKLSGILPVTDVAVELNKFAFMQLDNPEMKKREIDFCHGPLCGTGGLEAAVKEQQDGKCLLCGKESIGHYHHIVPRSRRGSNTIANIAGLCPKCHELVHKDADTAESLTEMKTGLMKKYGGTSVLNQIIPKLVETLADLFPGHFHVTNGWNTKEFREKHHLEKDHDVDAYCIACSHLKPEETLVETEPFEILPIGTKSRSLFTATCYSPKDYCYNNEGKRKRINSINAAVLTNNNKTIRALKEINKACVLLEKNNKIVPKAIRMIEDIPDNAIMVVEKGDTVECNVGKKKLRGIVSACMSNGNIKINVQGKQQSASLKKTRLIYKKQNIIFQKIHKTTK

SEQ ID NO: 25224 - protein, 637 aa, synthetic construct
  REGION 1..637: note = Engineered IscB
MRYVYVLDVDGKPLMPTCRFGKVRRMLKSGQAKAVDTLPFTIQLTYKPRTRILQPVTLGQDPGRTNIGMAAVRFDGKELGRFHCITRNKEIPKLMADRMAARKASRRGERLARKRLARKLHTTAKHLNGRILPGCSEPIAVKDIINTESRFNNRPKRKCKYVDPKTGEVCGANTPRKEKVRDLLLWDICQHLPVEPEQRLAILSYVNQVNIVRPEVLACLALEERALLENHRALARASKSKPLPQLLCELKIKKQLQSQILAIASGDPERKAADLKGRMAFCRKHFLLHHQQTRIPKPSAWLTPTATQLLRTHINLFRKLSGILPVTDVAVELNKFAFMQLDNPEMKKREIDFCHGPLCGTGGLEAAVKEQQDGKCLLCGKESIGHYHHIVPRSRRGSNTIANIAGLCPKCHELVHKDADTAESLTEMKTGLMKKYGGTSVLNQIIPKLVETLADLFPGHFHVTNGWNTKEFREKHHLEKDHDVDAYCIACSHLKPEETLVETEPFEILMRRYTKDSPRRQKYKANPLSNAKKDNKNLAPLFIGQGSRSRWVQQVQVNSYAETPVGIVRLRDLIKTIDGRIGYVRKINSGRKPKPGQKPVRILTLSHKPQGKEGQFSTSANKVEKIIRRRCGLLEML

SEQ ID NO: 25225 - protein, 679 aa, synthetic construct
  REGION 1..679: note = Engineered IscB
MRYVYVLDVDGKPLMPTCRFGKVRRMLKSGQAKAVDTLPFTIQLTYKPRTRILQPVTLGQDPGRTNIGMAAVRFDGKELGRFHCITRNKEIPKLMADRMAARKASRRGERLARKRLARKLHTTAKHLNGRILPGCSEPIAVKDIINTESRFNNRPKRKCKYVDPKTGEVCGANTPRKEKVRDLLLWDICQHLPVEPEQRLAILSYVNQVNIVRPEVLACLALEERALLENHRALARASKSKPLPQLLCELKIKKQLQSQILAIASGDPERKAADLKGRMAFCRKHFLLHHQQTRIPKPSAWLTPTATQLLRTHINLFRKLSGILPVTDVAVELNKFAFMQLDNPEMKKREIDFCHGPLCGTGGLEAAVKEQQDGKCLLCGKESIGHYHHIVPRSRRGSNTIANIAGLCPKCHELVHKDADTAESLTEMKTGLMKKYGGTSVLNQIIPKLVETLADLFPGHFHVTNGWNTKEFREKHHLEKDHDVDAYCIACSHLKPEETLVETEPFEILRFKKKSKNIVAARNQRVYKLNGKVIAYNRHKATNQKEDSLEEFLNDYRLTHSEDAVQRLMHDIEILPAVRTYTYHKQKIIAPCHAGDIIKYEKNNKIKGNVKSMIFPAISVKFSEVARSKKGVKWTEREWKVGIDNNHVRKAKFCMPIASGCLQTIDSVNTAEYLSKLAF

SEQ ID NO: 25226 - protein, 683 aa, synthetic construct
  REGION 1..683: note = Engineered IscB
MRYVYVLDVDGKPLMPTCRFGKVRRMLKSGQAKAVDTLPFTIQLTYKPRTRILQPVTLGQDPGRTNIGMAAVRFDGKELGRFHCITRNKEIPKLMADRMAARKASRRGERLARKRLARKLHTTAKHLNGRILPGCSEPIAVKDIINTESRFNNRPKRKCKYVDPKTGEVCGANTPRKEKVRDLLLWDICQHLPVEPEQRLAILSYVNQVNIVRPEVLACLALEERALLENHRALARASKSKPLPQLLCELKIKKQLQSQILAIASGDPERKAADLKGRMAFCRKHFLLHHQQTRIPKPSAWLTPTATQLLRTHINLFRKLSGILPVTDVAVELNKFAFMQLDNPEMKKREIDFCHGPLCGTGGLEAAVKEQQDGKCLLCGKESIGHYHHIVPRSRRGSNTIANIAGLCPKCHELVHKDADTAESLTEMKTGLMKKYGGTSVLNQIIPKLVETLADLFPGHFHVTNGWNTKEFREKHHLEKDHDVDAYCIACSHLKPEETLVETEPFEILQKRCNDRCMESFFDAKYIDSRDGKVKKGSELCKLRVATASSKRSTKKEDIDNKRIYRQEKVSKGKRRYENHSYCLKPGDLIYINYGNHKGNIAEVTTMQKNPNGTYKIVFSYANPKCKIPSINIKEKEYEELTHNQCEKVKIVRTRRGMIWRKVNRLEFEENTAEQIDKKVKNK

SEQ ID NO: 25227 - protein, 642 aa, synthetic construct
  REGION 1..642: note = Engineered IscB
MRYVYVLDVDGKPLMPTCRFGKVRRMLKSGQAKAVDTLPFTIQLTYKPRTRILQPVTLGQDPGRTNIGMAAVRFDGKELGRFHCITRNKEIPKLMADRMAARKASRRGERLARKRLARKLHTTAKHLNGRILPGCSEPIAVKDIINTESRFNNRPKRKCKYVDPKTGEVCGANTPRKEKVRDLLLWDICQHLPVEPEQRLAILSYVNQVNIVRPEVLACLALEERALLENHRALARASKSKPLPQLLCELKIKKQLQSQILAIASGDPERKAADLKGRMAFCRKHFLLHHQQTRIPKPSAWLTPTATQLLRTHINLFRKLSGILPVTDVAVELNKFAFMQLDNPEMKKREIDFCHGPLCGTGGLEAAVKEQQDGKCLLCGKESIGHYHHIVPRSRRGSNTIANIAGLCPKCHELVHKDADTAESLTEMKTGLMKKYGGTSVLNQIIPKLVETLADLFPGHFHVTNGWNTKEFREKHHLEKDHDVDAYCIACSHLKPEETLVETEPFEILQFRKHNRAIIHHQTERTYKLDGVTVAKNRKKRMEQKTDSLEDWYVDMAKEHGKTQADAMRSRLTVIKSTRYYNTPGRMMPGTVFLYEGKRYVMTKNHSNCTLTVELLDSGKEVTRLAKSFRILTKNTGLVFVA

SEQ ID NO: 25228 - protein, 672 aa, synthetic construct
  REGION 1..672: note = Engineered IscB
MRYVYVLDVDGKPLMPTCRFGKVRRMLKSGQAKAVDTLPFTIQLTYKPRTRILQPVTLGQDPGRTNIGMAAVRFDGKELGRFHCITRNKEIPKLMADRMAARKASRRGERLARKRLARKLHTTAKHLNGRILPGCSEPIAVKDIINTESRFNNRPKRKCKYVDPKTGEVCGANTPRKEKVRDLLLWDICQHLPVEPEQRLAILSYVNQVNIVRPEVLACLALEERALLENHRALARASKSKPLPQLLCELKIKKQLQSQILAIASGDPERKAADLKGRMAFCRKHFLLHHQQTRIPKPSAWLTPTATQLLRTHINLFRKLSGILPVTDVAVELNKFAFMQLDNPEMKKREIDFCHGPLCGTGGLEAAVKEQQDGKCLLCGKESIGHYHHIVPRSRRGSNTIANIAGLCPKCHELVHKDADTAESLTEMKTGLMKKYGGTSVLNQIIPKLVETLADLFPGHFHVTNGWNTKEFREKHHLEKDHDVDAYCIACSHLKPEETLVETEPFEILQFRKHNRAIIHHQTERTYKLDGVTVAKNRKKRMEQKTDSLEDWYVDMAKEHGKTQADAMRSRLTVIKSTRYYNTPGRMMPGRPLASEGSRKEFRKRWEDAFADLCRKHDIAKVFRITQGCVIEKTDGAKFQIRNFDKSQPWMKGGPFKQIRILTKNTGLVFVA

SEQ ID NO: 25229 - protein, 646 aa, synthetic construct
  REGION 1..646: note = Engineered IscB
MRYVYVLDVDGKPLMPTCRFGKVRRMLKSGQAKAVDTLPFTIQLTYKPRTRILQPVTLGQDPGRTNIGMAAVRFDGKELGRFHCITRNKEIPKLMADRMAARKASRRGERLARKRLARKLHTTAKHLNGRILPGCSEPIAVKDIINTESRFNNRPKRKCKYVDPKTGEVCGANTPRKEKVRDLLLWDICQHLPVEPEQRLAILSYVNQVNIVRPEVLACLALEERALLENHRALARASKSKPLPQLLCELKIKKQLQSQILAIASGDPERKAADLKGRMAFCRKHFLLHHQQTRIPKPSAWLTPTATQLLRTHINLFRKLSGILPVTDVAVELNKFAFMQLDNPEMKKREIDFCHGPLCGTGGLEAAVKEQQDGKCLLCGKESIGHYHHIVPRSRRGSNTIANIAGLCPKCHELVHKDADTAESLTEMKTGLMKKYGGTSVLNQIIPKLVETLADLFPGHFHVTNGWNTKEFREKHHLEKDHDVDAYCIACSHLKPEETLVETEPFEILQFRKHNRAIIHHQTERTYKLDGVTVAKNRKKRMEQKTDSLEDWYVDMAKEHGKTQADAMRSRLTVIKSTRYYNTPGRMMPGTVFLYEGKRYVMLELGERPVVDIKWVPTSDGKKKRVKTAIHATRILTKNTGLVFVA

SEQ ID NO: 25230 - protein, 647 aa, synthetic construct
  REGION 1..647: note = Engineered IscB
MRYVYVLDVDGKPLMPTCRFGKVRRMLKSGQAKAVDTLPFTIQLTYKPRTRILQPVTLGQDPGRTNIGMAAVRFDGKELGRFHCITRNKEIPKLMADRMAARKASRRGERLARKRLARKLHTTAKHLNGRILPGCSEPIAVKDIINTESRFNNRPKRKCKYVDPKTGEVCGANTPRKEKVRDLLLWDICQHLPVEPEQRLAILSYVNQVNIVRPEVLACLALEERALLENHRALARASKSKPLPQLLCELKIKKQLQSQILAIASGDPERKAADLKGRMAFCRKHFLLHHQQTRIPKPSAWLTPTATQLLRTHINLFRKLSGILPVTDVAVELNKFAFMQLDNPEMKKREIDFCHGPLCGTGGLEAAVKEQQDGKCLLCGKESIGHYHHIVPRSRRGSNTIANIAGLCPKCHELVHKDADTAESLTEMKTGLMKKYGGTSVLNQIIPKLVETLADLFPGHFHVTNGWNTKEFREKHHLEKDHDVDAYCIACSHLKPEETLVETEPFEILQFRKHNRAIIHHQTERTYKLDGVTVAKNRKKRMEQKTDSLEDWYVDMAKEHGKTQADAMRSRLTVIKSTRYYNTPGRMMPGDTVKAEDGNIYRILELGERPVVDIKWVPTSDGKKKRVKTAIHATRILTKNTGLVFVA

SEQ ID NO: 25231 - protein, 639 aa, synthetic construct
  REGION 1..639: note = Engineered IscB
MRYVYVLDVDGKPLMPTCRFGKVRRMLKSGQAKAVDTLPFTIQLTYKPRTRILQPVTLGQDPGRTNIGMAAVRFDGKELGRFHCITRNKEIPKLMADRMAARKASRRGERLARKRLARKLHTTAKHLNGRILPGCSEPIAVKDIINTESRFNNRPKRKCKYVDPKTGEVCGANTPRKEKVRDLLLWDICQHLPVEPEQRLAILSYVNQVNIVRPEVLACLALEERALLENHRALARASKSKPLPQLLCELKIKKQLQSQILAIASGDPERKAADLKGRMAFCRKHFLLHHQQTRIPKPSAWLTPTATQLLRTHINLFRKLSGILPVTDVAVELNKFAFMQLDNPEMKKREIDFCHGPLCGTGGLEAAVKEQQDGKCLLCGKESIGHYHHIVPRSRRGSNTIANIAGLCPKCHELVHKDADTAESLTEMKTGLMKKYGGTSVLNQIIPKLVETLADLFPGHFHVTNGWNTKEFREKHHLEKDHDVDAYCIACSHLKPEETLVETEPFEILQFRKHNRAIIHHQTERTYKLDGVTVAKNRKKRMEQKTDSLEDWYVDMAKEHGKTQADAMRSRLTVIKSTRYYNTPGRMMPGTVFLYEGKRYVMKKLGKSLVIANREGVEKTKTPKALRILTKNTGLVFVA

SEQ ID NO: 25232 - protein, 640 aa, synthetic construct
  REGION 1..640: note = Engineered IscB
MRYVYVLDVDGKPLMPTCRFGKVRRMLKSGQAKAVDTLPFTIQLTYKPRTRILQPVTLGQDPGRTNIGMAAVRFDGKELGRFHCITRNKEIPKLMADRMAARKASRRGERLARKRLARKLHTTAKHLNGRILPGCSEPIAVKDIINTESRFNNRPKRKCKYVDPKTGEVCGANTPRKEKVRDLLLWDICQHLPVEPEQRLAILSYVNQVNIVRPEVLACLALEERALLENHRALARASKSKPLPQLLCELKIKKQLQSQILAIASGDPERKAADLKGRMAFCRKHFLLHHQQTRIPKPSAWLTPTATQLLRTHINLFRKLSGILPVTDVAVELNKFAFMQLDNPEMKKREIDFCHGPLCGTGGLEAAVKEQQDGKCLLCGKESIGHYHHIVPRSRRGSNTIANIAGLCPKCHELVHKDADTAESLTEMKTGLMKKYGGTSVLNQIIPKLVETLADLFPGHFHVTNGWNTKEFREKHHLEKDHDVDAYCIACSHLKPEETLVETEPFEILQFRKHNRAIIHHQTERTYKLDGVTVAKNRKKRMEQKTDSLEDWYVDMAKEHGKTQADAMRSRLTVIKSTRYYNTPGRMMPGDQVADSKGDIFIVKKLGKSLVIANREGVEKTKTPKALRILTKNTGLVFVA

SEQ ID NO: 25233 - protein, 640 aa, synthetic construct
  REGION 1..640: note = Engineered IscB
MRYVYVLDVDGKPLMPTCRFGKVRRMLKSGQAKAVDTLPFTIQLTYKPRTRILQPVTLGQDPGRTNIGMAAVRFDGKELGRFHCITRNKEIPKLMADRMAARKASRRGERLARKRLARKLHTTAKHLNGRILPGCSEPIAVKDIINTESRFNNRPKRKCKYVDPKTGEVCGANTPRKEKVRDLLLWDICQHLPVEPEQRLAILSYVNQVNIVRPEVLACLALEERALLENHRALARASKSKPLPQLLCELKIKKQLQSQILAIASGDPERKAADLKGRMAFCRKHFLLHHQQTRIPKPSAWLTPTATQLLRTHINLFRKLSGILPVTDVAVELNKFAFMQLDNPEMKKREIDFCHGPLCGTGGLEAAVKEQQDGKCLLCGKESIGHYHHIVPRSRRGSNTIANIAGLCPKCHELVHKDADTAESLTEMKTGLMKKYGGTSVLNQIIPKLVETLADLFPGHFHVTNGWNTKEFREKHHLEKDHDVDAYCIACSHLKPEETLVETEPFEILQFRKHNRAIIHHQTERTYKLDGVTVAKNRKKRMEQKTDSLEDWYVDMAKEHGKTQADAMRSRLTVIKSTRYYNTPGRMMPGTVFLYEGKRYVMKKLGTSPVIEAIVGSDGKTRTVSATRILTKNTGLVFVA

SEQ ID NO: 25234 - protein, 642 aa, synthetic construct
  REGION 1..642: note = Engineered IscB
MRYVYVLDVDGKPLMPTCRFGKVRRMLKSGQAKAVDTLPFTIQLTYKPRTRILQPVTLGQDPGRTNIGMAAVRFDGKELGRFHCITRNKEIPKLMADRMAARKASRRGERLARKRLARKLHTTAKHLNGRILPGCSEPIAVKDIINTESRFNNRPKRKCKYVDPKTGEVCGANTPRKEKVRDLLLWDICQHLPVEPEQRLAILSYVNQVNIVRPEVLACLALEERALLENHRALARASKSKPLPQLLCELKIKKQLQSQILAIASGDPERKAADLKGRMAFCRKHFLLHHQQTRIPKPSAWLTPTATQLLRTHINLFRKLSGILPVTDVAVELNKFAFMQLDNPEMKKREIDFCHGPLCGTGGLEAAVKEQQDGKCLLCGKESIGHYHHIVPRSRRGSNTIANIAGLCPKCHELVHKDADTAESLTEMKTGLMKKYGGTSVLNQIIPKLVETLADLFPGHFHVTNGWNTKEFREKHHLEKDHDVDAYCIACSHLKPEETLVETEPFEILQFRKHNRAIIHHQTERTYKLDGVTVAKNRKKRMEQKTDSLEDWYVDMAKEHGKTQADAMRSRLTVIKSTRYYNTPGRMMPGNMVTVEGEEMIYRVKKLGTSPVIEAIVGSDGKTRTVSATRILTKNTGLVFVA

SEQ ID NO: 25235 - protein, 642 aa, synthetic construct
  REGION 1..642: note = Engineered IscB
MRYVYVLDVDGKPLMPTCRFGKVRRMLKSGQAKAVDTLPFTIQLTYKPRTRILQPVTLGQDPGRTNIGMAAVRFDGKELGRFHCITRNKEIPKLMADRMAARKASRRGERLARKRLARKLHTTAKHLNGRILPGCSEPIAVKDIINTESRFNNRPKRKCKYVDPKTGEVCGANTPRKEKVRDLLLWDICQHLPVEPEQRLAILSYVNQVNIVRPEVLACLALEERALLENHRALARASKSKPLPQLLCELKIKKQLQSQILAIASGDPERKAADLKGRMAFCRKHFLLHHQQTRIPKPSAWLTPTATQLLRTHINLFRKLSGILPVTDVAVELNKFAFMQLDNPEMKKREIDFCHGPLCGTGGLEAAVKEQQDGKCLLCGKESIGHYHHIVPRSRRGSNTIANIAGLCPKCHELVHKDADTAESLTEMKTGLMKKYGGTSVLNQIIPKLVETLADLFPGHFHVTNGWNTKEFREKHHLEKDHDVDAYCIACSHLKPEETLVETEPFEILQFRKHNRAIIHHQTERTYKLDGVTVAKNRKKRMEQKTDSLEDWYVDMAKEHGKTQADAMRSRLTVIKSTRYYNTPGRMMPGTVFLYEGKRYVMTKNNSDGTLTVERLDDGREVTRSARCFRILTKNTGLVFVA

SEQ ID NO: 25236 - protein, 646 aa, synthetic construct
  REGION 1..646: note = Engineered IscB
MRYVYVLDVDGKPLMPTCRFGKVRRMLKSGQAKAVDTLPFTIQLTYKPRTRILQPVTLGQDPGRTNIGMAAVRFDGKELGRFHCITRNKEIPKLMADRMAARKASRRGERLARKRLARKLHTTAKHLNGRILPGCSEPIAVKDIINTESRFNNRPKRKCKYVDPKTGEVCGANTPRKEKVRDLLLWDICQHLPVEPEQRLAILSYVNQVNIVRPEVLACLALEERALLENHRALARASKSKPLPQLLCELKIKKQLQSQILAIASGDPERKAADLKGRMAFCRKHFLLHHQQTRIPKPSAWLTPTATQLLRTHINLFRKLSGILPVTDVAVELNKFAFMQLDNPEMKKREIDFCHGPLCGTGGLEAAVKEQQDGKCLLCGKESIGHYHHIVPRSRRGSNTIANIAGLCPKCHELVHKDADTAESLTEMKTGLMKKYGGTSVLNQIIPKLVETLADLFPGHFHVTNGWNTKEFREKHHLEKDHDVDAYCIACSHLKPEETLVETEPFEILQFRKHNRAIIHHQTERTYKLDGVTVAKNRKKRMEQKTDSLEDWYVDMAKEHGKTQADAMRSRLTVIKSTRYYNTPGRMMPGKLVSFEQDGQTTRARITKNNSDGTLTVERLDDGREVTRSARCFRILTKNTGLVFVA

SEQ ID NO: 25237 - protein, 640 aa, synthetic construct
  REGION 1..640: note = Engineered IscB
MRYVYVLDVDGKPLMPTCRFGKVRRMLKSGQAKAVDTLPFTIQLTYKPRTRILQPVTLGQDPGRTNIGMAAVRFDGKELGRFHCITRNKEIPKLMADRMAARKASRRGERLARKRLARKLHTTAKHLNGRILPGCSEPIAVKDIINTESRFNNRPKRKCKYVDPKTGEVCGANTPRKEKVRDLLLWDICQHLPVEPEQRLAILSYVNQVNIVRPEVLACLALEERALLENHRALARASKSKPLPQLLCELKIKKQLQSQILAIASGDPERKAADLKGRMAFCRKHFLLHHQQTRIPKPSAWLTPTATQLLRTHINLFRKLSGILPVTDVAVELNKFAFMQLDNPEMKKREIDFCHGPLCGTGGLEAAVKEQQDGKCLLCGKESIGHYHHIVPRSRRGSNTIANIAGLCPKCHELVHKDADTAESLTEMKTGLMKKYGGTSVLNQIIPKLVETLADLFPGHFHVTNGWNTKEFREKHHLEKDHDVDAYCIACSHLKPEETLVETEPFEILQFRKHNRAIIHHQTERTYKLDGVTVAKNRKKRMEQKTDSLEDWYVDMAKEHGKTQADAMRSRLTVIKSTRYYNTPGRMMPGTVFLYEGKRYVMTVRATGNFAVTPKNGKQVSIMYKYCRILTKNTGLVFVA

SEQ ID NO: 25238 - protein, 658 aa, synthetic construct
  REGION 1..658: note = Engineered IscB
MRYVYVLDVDGKPLMPTCRFGKVRRMLKSGQAKAVDTLPFTIQLTYKPRTRILQPVTLGQDPGRTNIGMAAVRFDGKELGRFHCITRNKEIPKLMADRMAARKASRRGERLARKRLARKLHTTAKHLNGRILPGCSEPIAVKDIINTESRFNNRPKRKCKYVDPKTGEVCGANTPRKEKVRDLLLWDICQHLPVEPEQRLAILSYVNQVNIVRPEVLACLALEERALLENHRALARASKSKPLPQLLCELKIKKQLQSQILAIASGDPERKAADLKGRMAFCRKHFLLHHQQTRIPKPSAWLTPTATQLLRTHINLFRKLSGILPVTDVAVELNKFAFMQLDNPEMKKREIDFCHGPLCGTGGLEAAVKEQQDGKCLLCGKESIGHYHHIVPRSRRGSNTIANIAGLCPKCHELVHKDADTAESLTEMKTGLMKKYGGTSVLNQIIPKLVETLADLFPGHFHVTNGWNTKEFREKHHLEKDHDVDAYCIACSHLKPEETLVETEPFEILQFRKHNRAIIHHQTERTYKLDGVTVAKNRKKRMEQKTDSLEDWYVDMAKEHGKTQADAMRSRLTVIKSTRYYNTPGRMMPGDWVKIRALSPEQNANRNEKNQITRPVYGRVTVRATGNFAVTPKNGKQVSIMYKYCRILTKNTGLVFVA

SEQ ID NO: 25239 - protein, 653 aa, synthetic construct
  REGION 1..653: note = Engineered IscB
MRYVYVLDVDGKPLMPTCRFGKVRRMLKSGQAKAVDTLPFTIQLTYKPRTRILQPVTLGQDPGRTNIGMAAVRFDGKELGRFHCITRNKEIPKLMADRMAARKASRRGERLARKRLARKLHTTAKHLNGRILPGCSEPIAVKDIINTESRFNNRPKRKCKYVDPKTGEVCGANTPRKEKVRDLLLWDICQHLPVEPEQRLAILSYVNQVNIVRPEVLACLALEERALLENHRALARASKSKPLPQLLCELKIKKQLQSQILAIASGDPERKAADLKGRMAFCRKHFLLHHQQTRIPKPSAWLTPTATQLLRTHINLFRKLSGILPVTDVAVELNKFAFMQLDNPEMKKREIDFCHGPLCGTGGLEAAVKEQQDGKCLLCGKESIGHYHHIVPRSRRGSNTIANIAGLCPKCHELVHKDADTAESLTEMKTGLMKKYGGTSVLNQIIPKLVETLADLFPGHFHVTNGWNTKEFREKHHLEKDHDVDAYCIACSHLKPEETLVETEPFEILQFRKHNRAIIHHQTERTYKLDGVTVAKNRKKRMEQKTDSLEDWYVDMAKEHGKTQADAMRSRLTVIKSTRYYNTPGRMMPGTVFLYEGKRYVMTGQITNGKYYRAYGQEKRNFPAVKVRILTKNTGLQTIDSVNTAEYLSKLAF

SEQ ID NO: 25240 - protein, 653 aa, synthetic construct
  REGION 1..653: note = Engineered IscB
MRYVYVLDVDGKPLMPTCRFGKVRRMLKSGQAKAVDTLPFTIQLTYKPRTRILQPVTLGQDPGRTNIGMAAVRFDGKELGRFHCITRNKEIPKLMADRMAARKASRRGERLARKRLARKLHTTIQNGEDDAVRTKHQCKSVQISYPTATESVIHKVIRNTESRFNNRPKRKCKYVDPKTGEVCGANTPRKEKVRDLLLWDICQHLPVEPEQRLAILSYVNQVNIVRPEVLACLALEERALLENHRALARASKSKPLPQLLCELKIKKQLQSQILAIASGDPERKAADLKGRMAFCRKHFLLHHQQTRIPKPSAWLTPTATQLLRTHINLFRKLSGILPVTDVAVELNKFAFMQLDNPEMKKREIDFCHGPLCGTGGLEAAVKEQQDGKCLLCGKESIGHYHHIVPRSRRGSNTIANIAGLCPKCHELVHKDADTAESLTEMKTGLMKKYGGTSVLNQIIPKLVETLADLFPGHFHVTNGWNTKEFREKHHLEKDHDVDAYCIACSHLKPEETLVETEPFEILQFRKHNRAIIHHQTERTYKLDGVTVAKNRKKRMEQKTDSLEDWYVDMAKEHGKTQADAMRSRLTVIKSTRYYNTPGRMMPGTVFLYEGKRYVMTGQITNGKYYRAYGQEKRNFPAVKVRILTKNTGLVFVA

SEQ ID NO: 25241 - protein, 657 aa, synthetic construct
  REGION 1..657: note = Engineered IscB
MRYVYVLDVDGKPLMPTCRFGKVRRMLKSGQAKAVDTLPFTIQLTYKPRTRILQPVTLGQDPGRTNIGMAAVRFDGKELGRFHCITRNKEIPKLMADRMAARKASRRGERLARKRLARKLHTTAKHLNGRILPGCSEPIAVKDIINTESRFNNRPKRKCKYVDPKTGEVCGANTPRKEKVRDLLLWDICQHLPVEPEQRLAILSYVNQVNIVRPEVLACLALEERALLENHRALARASKSKPLPQLLCELKIKKQLQSQILAIASGDPERKAADLKGRMAFCRKHFLLHHQQTRIPKPSAWLTPTATQLLRTHINLFRKLSGILPVTDVAVELNKFAFMQLDNPEMKKREIDFCHGPLCGTGGLEAAVKEQQDGKCLLCGKESIGHYHHIVPRSRRGSNTIANIAGLCPKCHELVHKDADTAESLTEMKTGLMKKYGGTSVLNQIIPKLVETLADLFPGHFHVTNGWNTKEFREKHHLEKDHDVDAYCIACSHLKPEETLVETEPFEILQFKKKSKNIVAARNERTYKLDGVTVAKNRKKRMEQKTDSLEDWYVDMAKEHGKTQADAMRSRLTVIKSVRTYTYHKQKIIAPCHAGTVFLYEGKRYVMISVKFSEVARSKKGVKWTEREWKVGIDNNHVRKAKKVRILTKNTGLVFVA

SEQ ID NO: 25242 - protein, 645 aa, synthetic construct
  REGION 1..645: note = Engineered IscB
MRYVYVLDVDGKPLMPTCRFGKVRRMLKSGQAKAVDTLPFTIQLTYKPRTRILQPVTLGQDPGRTNIGMAAVRFDGKELGRFHCITRNKEIPKLMADRMAARKASRRGERLARKRLARKLHTTAKHLNGRILPGCSEPIAVKDIINTESRFNNRPKRKCKYVDPKTGEVCGANTPRKEKVRDLLLWDICQHLPVEPEQRLAILSYVNQVNIVRPEVLACLALEERALLENHRALARASKSKPLPQLLCELKIKKQLQSQILAIASGDPERKAADLKGRMAFCRKHFLLHHQQTRIPKPSAWLTPTATQLLRTHINLFRKLSGILPVTDVAVELNKFAFMQLDNPEMKKREIDFCHGPLCGTGGLEAAVKEQQDGKCLLCGKESIGHYHHIVPRSRRGSNTIANIAGLCPKCHELVHKDADTAESLTEMKTGLMKKYGGTSVLNQIIPKLVETLADLFPGHFHVTNGWNTKEFREKHHLEKDHDVDAYCIACSHLKPEETLVETEPFEILQFKKKSKNIVAARNERTYKLDGVTVAKNRKKRMEQKTDSLEDWYVDMAKEHGKTQADAMRSRLTVIKSVRTYTYHKQKIIAPCHAGTVFLYEGKRYVMTGQITNGKYYRAYGQEKRNFPAVKVRILTKNTGLVFVA

SEQ ID NO: 25243 - protein, 645 aa, synthetic construct
  REGION 1..645: note = Engineered IscB
MRYVYVLDVDGKPLMPTCRFGKVRRMLKSGQAKAVDTLPFTIQLTYKPRTRILQPVTLGQDPGRTNIGMAAVRFDGKELGRFHCITRNKEIPKLMADRMAARKASRRGERLARKRLARKLHTTAKHLNGRILPGCSEPIAVKDIINTESRFNNRPKRKCKYVDPKTGEVCGANTPRKEKVRDLLLWDICQHLPVEPEQRLAILSYVNQVNIVRPEVLACLALEERALLENHRALARASKSKPLPQLLCELKIKKQLQSQILAIASGDPERKAADLKGRMAFCRKHFLLHHQQTRIPKPSAWLTPTATQLLRTHINLFRKLSGILPVTDVAVELNKFAFMQLDNPEMKKREIDFCHGPLCGTGGLEAAVKEQQDGKCLLCGKESIGHYHHIVPRSRRGSNTIANIAGLCPKCHELVHKDADTAESLTEMKTGLMKKYGGTSVLNQIIPKLVETLADLFPGHFHVTNGWNTKEFREKHHLEKDHDVDAYCIACSHLKPEETLVETEPFEILQFRKHNKNIVAARNERTYKLDGVTVAKNRKKRMEQKTDSLEDWYVDMAKEHGKTQADAMRSRLTVIKAVRTYTYHKQKIIAPCHAGTVFLYEGKRYVMTGQITNGKYYRAYGQEKRNFPAVKVRILTKNTGLVFVA

SEQ ID NO: 25244 - protein, 645 aa, synthetic construct
  REGION 1..645: note = Engineered IscB
MRYVYVLDVDGKPLMPTCRFGKVRRMLKSGQAKAVDTLPFTIQLTYKPRTRILQPVTLGQDPGRTNIGMAAVRFDGKELGRFHCITRNKEIPKLMADRMAARKASRRGERLARKRLARKLHTTAKHLNGRILPGCSEPIAVKDIINTESRFNNRPKRKCKYVDPKTGEVCGANTPRKEKVRDLLLWDICQHLPVEPEQRLAILSYVNQVNIVRPEVLACLALEERALLENHRALARASKSKPLPQLLCELKIKKQLQSQILAIASGDPERKAADLKGRMAFCRKHFLLHHQQTRIPKPSAWLTPTATQLLRTHINLFRKLSGILPVTDVAVELNKFAFMQLDNPEMKKREIDFCHGPLCGTGGLEAAVKEQQDGKCLLCGKESIGHYHHIVPRSRRGSNTIANIAGLCPKCHELVHKDADTAESLTEMKTGLMKKYGGTSVLNQIIPKLVETLADLFPGHFHVTNGWNTKEFREKHHLEKDHDVDAYCIACSHLKPEETLVETEPFEILQFKKKSKNIVAARNERTYKLDGVTVAKNRKKRMEQKTDSLEDWYVDMAKEHGKTQADAMRSRLTVIKAVRTYTYHKQKIIAPCHAGTVFLYEGKRYVMTGQITNGKYYRAYGQEKRNFPAVKVRILTKNTGLVFVA

SEQ ID NO: 25245 - protein, 679 aa, synthetic construct
  REGION 1..679: note = Engineered IscB
MRYVYVLDVDGKPLMPTCRFGKVRRMLKSGQAKAVDTLPFTIQLTYKPRTRILQPVTLGQDPGRTNIGMAAVRFDGKELGRFHCITRNKEIPKLMADRMAARKASRRGERLARKRLARKLHTTAKHLNGRILPGCSEPIAVKDIINTESRFNNRPKRKCKYVDPKTGEVCGANTPRKEKVRDLLLWDICQHLPVEPEQRLAILSYVNQVNIVRPEVLACLALEERALLENHRALARASKSKPLPQLLCELKIKKQLQSQILAIASGDPERKAADLKGRMAFCRKHFLLHHQQTRIPKPSAWLTPTATQLLRTHINLFRKLSGILPVTDVAVELNKFAFMQLDNPEMKKREIDFCHGPLCGTGGLEAAVKEQQDGKCLLCGKESIGHYHHIVPRSRRGSNTIANIAGLCPKCHELVHKDADTAESLTEMKTGLMKKYGGTSVLNQIIPKLVETLADLFPGHFHVTNGWNTKEFREKHHLEKDHDVDAYCIACSHLKPEETLVETEPFEILRFKKKSKNIVAARNERTYKLDGVTVAKNRKKRMEQKTDSLEDWYVDMAKEHGKTQADAMRSRLTVIKSVRTYTYHKQKIIAPCHAGDIIKYEKNNKIKGNVKSMIFPAISVKFSEVARSKKGVKWTEREWKVGIDNNHVRKAKFCMPIASGCLQTIDSVNTAEYLSKLAF

SEQ ID NO: 25246 - protein, 640 aa, synthetic construct
  REGION 1..640: note = Engineered IscB
MRYVYVLDVDGKPLMPTCRFGKVRRMLKSGQAKAVDTLPFTIQLTYKPRTRILQPVTLGQDPGRTNIGMAAVRFDGKELGRFHCITRNKEIPKLMADRMAARKASRRGERLARKRLARKLHTTAKHLNGRILPGCSEPIAVKDIINTESRFNNRPKRKCKYVDPKTGEVCGANTPRKEKVRDLLLWDICQHLPVEPEQRLAILSYVNQVNIVRPEVLACLALEERALLENHRALARASKSKPLPQLLCELKIKKQLQSQILAIASGDPERKAADLKGRMAFCRKHFLLHHQQTRIPKPSAWLTPTATQLLRTHINLFRKLSGILPVTDVAVELNKFAFMQLDNPEMKKREIDFCHGPLCGTGGLEAAVKEQQDGKCLLCGKESIGHYHHIVPRSRRGSNTIANIAGLCPKCHELVHKDADTAESLTEMKTGLMKKYGGTSVLNQIIPKLVETLADLFPGHFHVTNGWNTKEFREKHHLEKDHDVDAYCIACSHLKPEETLVETEPFEILQFRKHNRAIIHHQTERTYKLDGVTVAKNRKKRMEQKTDSLEDWYVDMAKEHGKTQADAMRSRLTVIKSTRYYNTPGRMMPGTVFLYEGKRYVMKGVRKTGSFTMEGKDKDLNVSYKKIRILTKNTGLVFVA

SEQ ID NO: 25247 - protein, 664 aa, synthetic construct
  REGION 1..664: note = Engineered IscB
MNYIRYVYVLDVDGKPLMPTCRFGKVRRMLKSGQAKAVDTLPFTIQLTYKPRTRILQPVTLGQDPGRTNIGMAAVRFDGKELGRFHCITRNKEIPKLMADRMAARKASRRGERLARKRLARKLHTTAKHLNGRILPGCSEPIAVKDIINTESRFNNRPKRKCKYVDPKTGEVCGANTPRKEKVRDLLLWDICQHLPVEPEQRLAILSYVNQVNIVRPEVLACLALEERALLENHRALARASKSKPLPQLLCELKIKKQLQSQILAIASGDPERKAADLKGRMAFCRKHFLLHHQQTRIPKPSAWLTPTATQLLRTHINLFRKLSGILPVTDVAVELNKFAFMQLDNPEMKKREIDFCHGPLCGTGGLEAAVKEQQDGKCLLCGKESIGHYHHIVPRSRRGSNTIANIAGLCPKCHELVHKDADTAESLTEMKTGLMKKYGGTSVLNQIIPKLVETLADLFPGHFHVTNGWNTKEFREKHHLKKYHYVDAYCIACSHLKPEETLVETEPFEILQFRKHNRAIIHHQTERTYKLDGVTVAKNRKKRMEQKTDSLEDWYVDMAKEHGKTQADAMRSRLTVIKSTRYYNTPGRMMPGTVFLYEGKRYVMTGQITNGKYYRAYGQEKRNFPAVKVRILRTRRGMIWRKVNRLEFEENTAEQIDKKVKNK

SEQ ID NO: 25248 - protein, 664 aa, synthetic construct
  REGION 1..664: note = Engineered IscB
MNYIRYVYVLDVDGKPLMPTCRFGKVRRMLKSGQAKAVDTLPFTIQLTYKPRTRILQPVTLGQDPGRTNIGMAAVRFDGKELGRFHCITRNKEIPKLMADRMAARKASRRGERLARKRLARKLHTTAKHLNGRILPGCSEPIAVKDIINTESRFNNRPKRKCKYVDPKTGEVCGANTPRKEKVRDLLLWDICQHLPVEPEQRLAILSYVNQVNIVRPEVLACLALEERALLENHRALARASKSKPLPQLLCELKIKKQLQSQILAIASGDPERKAADLKGRMAFCRKHFLLHHQQTRIPKPSAWLTPTATQLLRTHINLFRKLSGILPVTDVAVELNKFAFMQLDNPEMKKREIDFCHGPLCGTGGLEAAVKEQQDGKCLLCGKESIGHYHHIVPRSRRGSNTIANIAGLCPKCHELVHKDADTAESLTEMKTGLMKKYGGTSVLNQIIPKLVETLADLFPGHFHVTNGWNTKEFREKHHLKKYHYVDAYCIACSHLKPEETLLTRNVYLVEQKRKHNRAIIHHQTERTYKLDGVTVAKNRKKRMEQKTDSLEDWYVDMAKEHGKTQADAMRSRLTVIKSTRYYNTPGRMMPGTVFLYEGKRYVMTGQITNGKYYRAYGQEKRNFPAVKVRILRTRRGMIWRKVNRLEFEENTAEQIDKKVKNK

SEQ ID NO: 25249 - protein, 637 aa, synthetic construct
  REGION 1..637: note = Engineered IscB
MRYVYVLDVDGKPLMPTCRFGKVRRMLKSGQAKAVDTLPFTIQLTYKPRTRILQPVTLGQDPGRTNIGMAAVRFDGKELGRFHCITRNKEIPKLMADRMAARKASRRGERLARKRLARKLHTTAKHLNGRILPGCSEPIAVKDIINTESRFNNRPKRKCKYVDPKTGEVCGANTPRKEKVRDLLLWDICQHLPVEPEQRLAILSYVNQVNIVRPEVLACLALEERALLENHRALARASKSKPLPQLLCELKIKKQLQSQILAIASGDPERKAADLKGRMAFCRKHFLLHHQQTRIPKPSAWLTPTATQLLRTHINLFRKLSGILPVTDVAVELNKFAFMQLDNPEMKKREIDFCHGPLCGTGGLEAAVKEQQDGKCLLCGKESIGHYHHIVPRSRRGSNTIANIAGLCPKCHELVHKDADTAESLTEMKTGLMKKYGGTSVLNQIIPKLVETLADLFPGHFHVTNGWNTKEFREKHHLEKDHDVDAYCIACSHLKPEETLVETEPFEILQFRKHNRCMESFFERTYKLDGVTVAKNRKKRMEQKTDSLEDWYVDMAKEHGKTQADAMRSRLTVIKSKRRYENHSMPGTVFLYEGKRYVMTGQITNGKYYRAYGQEKRNFPAVKVRILTKNTGLVFVA

SEQ ID NO: 25250 - protein, 686 aa, synthetic construct
  REGION 1..686: note = Engineered IscB
MRYVYVLDVDGKPLMPTCRFGKVRRMLKSGQAKAVDTLPFTIQLTYKPRTRILQPVTLGQDPGRTNIGMAAVRFDGKELGRFHCITRNKEIPKLMADRMAARKASRRGERLARKRLARKLHTTAKHLNGRILPGCSEPIAVKDIINTESRFNNRPKRKCKYVDPKTGEVCGANTPRKEKVRDLLLWDICQHLPVEPEQRLAILSYVNQVNIVRPEVLACLALEERALLENHRALARASKSKPLPQLLCELKIKKQLQSQILAIASGDPERKAADLKGRMAFCRKHFLLHHQQTRIPKPSAWLTPTATQLLRTHINLFRKLSGILPVTDVAVELNKFAFMQLDNPEMKKREIDFCHGPLCGTGGLEAAVKEQQDGKCLLCGKESIGHYHHIVPRSRRGSNTIANIAGLCPKCHELVHKDADTAESLTEMKTGLMKKYGGTSVLNQIIPKLVETLADLFPGHFHVTNGWNTKEFREKHHLEKDHDVDAYCIACSHLKPEETLVETEPFEILQKRCNDRCMESFFERTYKLDGVTVAKNRKKRMEQKTDSLEDWYVDMAKEHGKTQADAMRSRLTVIKSKRRYENHSYCLKPGDLIYINYGNHKGNIAEVTTMQKNPNGTYKIVFSYANPKCKIPSINIKEKEYEELTHNQCEKVKIVRTRRGMIWRKVNRLEFEENTAEQIDKKVKNK

SEQ ID NO: 25251 - protein, 666 aa, synthetic construct
  REGION 1..666: note = Engineered IscB
MRYVYVLDVDGKPLMPTCRFGKVRRMLKSGQAKAVDTLPFTIQLTYKPRTRILQPVTLGQDPGRTNIGMAAVRFDGKELGRFHCITRNKEIPKLMADRMAARKASRRGERLARKRLARKLHTTAKHLNGRILPGCSEPIAVKDIINTESRFNNRPKRKCKYVDPKTGEVCGANTPRKEKVRDLLLWDICQHLPVEPEQRLAILSYVNQVNIVRPEVLACLALEERALLENHRALARASKSKPLPQLLCELKIKKQLQSQILAIASGDPERKAADLKGRMAFCRKHFLLHHQQTRIPKPSAWLTPTATQLLRTHINLFRKLSGILPVTDVAVELNKFAFMQLDNPEMKKREIDFCHGPLCGTGGLEAAVKEQQDGKCLLCGKESIGHYHHIVPRSRRGSNTIANIAGLCPKCHELVHKDADTAESLTEMKTGLMKKYGGTSVLNQIIPKLVETLADLFPGHFHVTNGWNTKEFREKHHLEKDHDVDAYCIACSHLKPEETLVETEPFEILQFRKHNRAIIHHQTERTYKLDGVTVAKNRKKRMEQKTDSLEDWYVDMAKEHGKTQADAMRSRLTVIKSTRYYENHSYCLKPGDLIYINYGNHKGNIAEVTTMQKNPNGTYKIVFSYANPKCKIPSINIKEKEYEELTHNQCEKVKIVRTRRGLVFVA

SEQ ID NO: 25252 - protein, 651 aa, synthetic construct
  REGION 1..651: note = Engineered IscB
MRYVYVLDVDGKPLMPTCRFGKVRRMLKSGQAKAVDTLPFTIQLTYKPRTRILQPVTLGQDPGRTNIGMAAVRFDGKELGRFHCITRNKEIPKLMADRMAARKASRRGERLARKRLARKLHTTAKHLNGRILPGCSEPIAVKDIINTESRFNNRPKRKCKYVDPKTGEVCGANTPRKEKVRDLLLWDICQHLPVEPEQRLAILSYVNQVNIVRPEVLACLALEERALLENHRALARASKSKPLPQLLCELKIKKQLQSQILAIASGDPERKAADLKGRMAFCRKHFLLHHQQTRIPKPSAWLTPTATQLLRTHINLFRKLSGILPVTDVAVELNKFAFMQLDNPEMKKREIDFCHGPLCGTGGLEAAVKEQQDGKCLLCGKESIGHYHHIVPRSRRGSNTIANIAGLCPKCHELVHKDADTAESLTEMKTGLMKKYGGTSVLNQIIPKLVETLADLFPGHFHVTNGWNTKEFREKHHLEKDHDVDAYCIACSHLKPEETLVETEPFEILQFRKHNRAIIHHQTERTYKLDGVTVAKGSELCKLRVATASSKRSTKKEDIDNKWYVDMAKEHGKTQADAMRSRLTVIKSTRYYNTPGRMMPGTVFLYEGKRYVMTGQITNGKYYRAYGQEKRNFPAVKVRILTKNTGLVFVA

SEQ ID NO: 25253 - protein, 637 aa, synthetic construct
  REGION 1..637: note = Engineered IscB
MRYVYVLDVDGKPLMPTCRFGKVRRMLKSGQAKAVDTLPFTIQLTYKPRTRILQPVTLGQDPGRTNIGMAAVRFDGKELGRFHCITRNKEIPKLMADRMAARKASRRGERLARKRLARKLHTTAKHLNGRILPGCSEPIAVKDIINTESRFNNRPKRKCKYVDPKTGEVCGANTPRKEKVRDLLLWDICQHLPVEPEQRLAILSYVNQVNIVRPEVLACLALEERALLENHRALARASKSKPLPQLLCELKIKKQLQSQILAIASGDPERKAADLKGRMAFCRKHFLLHHQQTRIPKPSAWLTPTATQLLRTHINLFRKLSGILPVTDVAVELNKFAFMQLDNPEMKKREIDFCHGPLCGTGGLEAAVKEQQDGKCLLCGKESIGHYHHIVPRSRRGSNTIANIAGLCPKCHELVHKDADTAESLTEMKTGLMKKYGGTSVLNQIIPKLVETLADLFPGHFHVTNGWNTKEFREKHHLEKDHDVDAYCIACSHLKPEETLVETEPFEILQFRKHNRAIIHHQTDAKYIDSRDGKVKKGSELCKLRVATASSKRSTKKEDIDNKRIYRQEKVSKGTRYYNTPGRMMPGTVFLYEGKRYVMTGQITNGKYYRAYGQEKRNFPAVKVRILTKNTGLVFVA

SEQ ID NO: 25254 - protein, 650 aa, synthetic construct
  REGION 1..650: note = Engineered IscB
MRYVYVLDVDGKPLMPTCRFGKVRRMLKSGQAKAVDTLPFTIQLTYKPRTRILQPVTLGQDPGRTNIGMAAVRFDGKELGRFHCITRNKEIPKLMADRMAARKASRRGERLARKRLARKLHTTAKHLNGRILPGCSEPIAVKDIINTESRFNNRPKRKCKYVDPKTGEVCGANTPRKEKVRDLLLWDICQHLPVEPEQRLAILSYVNQVNIVRPEVLACLALEERALLENHRALARASKSKPLPQLLCELKIKKQLQSQILAIASGDPERKAADLKGRMAFCRKHFLLHHQQTRIPKPSAWLTPTATQLLRTHINLFRKLSGILPVTDVAVELNKFAFMQLDNPEMKKREIDFCHGPLCGTGGLEAAVKEQQDGKCLLCGKESIGHYHHIVPRSRRGSNTIANIAGLCPKCHELVHKDADTAESLTEMKTGLMKKYGGTSVLNQIIPKLVETLADLFPGHFHVTNGWNTKEFREKHHLEKDHDVDAYCIACSHLKPEETLVETEPFEILQFRKHNRAIIHHQTERTYKLDGVTVAKNRKKRMEQKTDSLEDWYVDMAKEHGKTQADAMRSRLTVIKSTRYYNTPGRMMPGDIVRAEIPKGKYVGTYVSRIAETTTSKPLAGFKSKTGKRIQCHTKHMRILTKNTGLVFVA

SEQ ID NO: 25255 - protein, 642 aa, synthetic construct
  REGION 1..642: note = Engineered IscB
MRYVYVLDVDGKPLMPTCRFGKVRRMLKSGQAKAVDTLPFTIQLTYKPRTRILQPVTLGQDPGRTNIGMAAVRFDGKELGRFHCITRNKEIPKLMADRMAARKASRRGERLARKRLARKLHTTAKHLNGRILPGCSEPIAVKDIINTESRFNNRPKRKCKYVDPKTGEVCGANTPRKEKVRDLLLWDICQHLPVEPEQRLAILSYVNQVNIVRPEVLACLALEERALLENHRALARASKSKPLPQLLCELKIKKQLQSQILAIASGDPERKAADLKGRMAFCRKHFLLHHQQTRIPKPSAWLTPTATQLLRTHINLFRKLSGILPVTDVAVELNKFAFMQLDNPEMKKREIDFCHGPLCGTGGLEAAVKEQQDGKCLLCGKESIGHYHHIVPRSRRGSNTIANIAGLCPKCHELVHKDADTAESLTEMKTGLMKKYGGTSVLNQIIPKLVETLADLFPGHFHVTNGWNTKEFREKHHLEKDHDVDAYCIACSHLKPEETLVETEPFEILQFRKHNRAIIHHQTERTYKLDGVTVAKNRKKRMEQKTDSLEDWYVDMAKEHGKTQADAMRSRLTVIKSTRYYNTPGRMMPGTVFLYEGKRYVMAETTTSKPLAGFKSKTGKRIQCHTKHMRILTKNTGLVFVA

SEQ ID NO: 25256 - protein, 650 aa, synthetic construct; identical to SEQ ID NO: 25254
  REGION 1..650: note = Engineered IscB

SEQ ID NO: 25257 - protein, 640 aa, synthetic construct
  REGION 1..640: note = Engineered IscB
MRYVYVLDVDGKPLMPTCRFGKVRRMLKSGQAKAVDTLPFTIQLTYKPRTRILQPVTLGQDPGRTNIGMAAVRFDGKELGRFHCITRNKEIPKLMADRMAARKASRRGERLARKRLARKLHTTAKHLNGRILPGCSEPIAVKDIINTESRFNNRPKRKCKYVDPKTGEVCGANTPRKEKVRDLLLWDICQHLPVEPEQRLAILSYVNQVNIVRPEVLACLALEERALLENHRALARASKSKPLPQLLCELKIKKQLQSQILAIASGDPERKAADLKGRMAFCRKHFLLHHQQTRIPKPSAWLTPTATQLLRTHINLFRKLSGILPVTDVAVELNKFAFMQLDNPEMKKREIDFCHGPLCGTGGLEAAVKEQQDGKCLLCGKESIGHYHHIVPRSRRGSNTIANIAGLCPKCHELVHKDADTAESLTEMKTGLMKKYGGTSVLNQIIPKLVETLADLFPGHFHVTNGWNTKEFREKHHLEKDHDVDAYCIACSHLKPEETLVETEPFEILQFRKHNRAIIHHQTERTYKLDGVTVAKNRKKRMEQKTDSLEDWYVDMAKEHGKTQADAMRSRLTVIKSTRYYNTPGRMMPGTVFLYEGKRYVMSACMSNGNIKINVQGKQQSASLKKTRILTKNTGLVFVA

SEQ ID NO: 25258 - protein, 683 aa, synthetic construct
  REGION 1..683: note = Engineered IscB
MRYVYVLDVDGKPLMPTCRFGKVRRMLKSGQAKAVDTLPFTIQLTYKPRTRILQPVTLGQDPGRTNIGMAAVRFDGKELGRFHCITRNKEIPKLMADRMAARKASRRGERLARKRLARKLHTTAKHLNGRILPGCSEPIAVKDIINTESRFNNRPKRKCKYVDPKTGEVCGANTPRKEKVRDLLLWDICQHLPVEPEQRLAILSYVNQVNIVRPEVLACLALEERALLENHRALARASKSKPLPQLLCELKIKKQLQSQILAIASGDPERKAADLKGRMAFCRKHFLLHHQQTRIPKPSAWLTPTATQLLRTHINLFRKLSGILPVTDVAVELNKFAFMQLDNPEMKKREIDFCHGPLCGTGGLEAAVKEQQDGKCLLCGKESIGHYHHIVPRSRRGSNTIANIAGLCPKCHELVHKDADTAESLTEMKTGLMKKYGGTSVLNQIIPKLVETLADLFPGHFHVTNGWNTKEFREKHHLEKDHDVDAYCIACSHLKPEETLVETEPFEILQFRKHNRAIIHHQTERTYKLDGVTVAKNRKKRMEQKTDSLEDWYVDMAKEHGKTQADAMRSRLTVIKSTRYYTNNNKTIRALKEINKACVLLEKNNKIVPKAIRMIEDIPDNAIMVVEKGDTVECNVGKKKLRGIVSACMSNGNIKINVQGKQQSASLKKTRILTKNTGLVFVA

SEQ ID NO: 25259 - protein, 654 aa, synthetic construct
  REGION 1..654: note = Engineered IscB
MRYVYVLDVDGKPLMPTCRFGKVRRMLKSGQAKAVDTLPFTIQLTYKPRTRILQPVTLGQDPGRTNIGMAAVRFDGKELGRFHCITRNKEIPKLMADRMAARKASRRGERLARKRLARKLHTTAKHLNGRILPGCSEPIAVKDIINTESRFNNRPKRKCKYVDPKTGEVCGANTPRKEKVRDLLLWDICQHLPVEPEQRLAILSYVNQVNIVRPEVLACLALEERALLENHRALARASKSKPLPQLLCELKIKKQLQSQILAIASGDPERKAADLKGRMAFCRKHFLLHHQQTRIPKPSAWLTPTATQLLRTHINLFRKLSGILPVTDVAVELNKFAFMQLDNPEMKKREIDFCHGPLCGTGGLEAAVKEQQDGKCLLCGKESIGHYHHIVPRSRRGSNTIANIAGLCPKCHELVHKDADTAESLTEMKTGLMKKYGGTSVLNQIIPKLVETLADLFPGHFHVTNGWNTKEFREKHHLEKDHDVDAYCIACSHLKPEETLVETEPFEILQFRKHNRAIIHHQTERTYKLDGVTVAKNRKKRMEQKTDSLEDWYVDMAKEHGKTQADAMRSRLTVIKSTRYYNTPGRMMPGTVFLYEGKRYVMRKINSGRKPKPGQKPVRILTLSHKPQGKEGQFSTSANKVRILTKNTGLVFVA

SEQ ID NO: 25260 - protein, 655 aa, synthetic construct
  REGION 1..655: note = Engineered IscB
MRYVYVLDVDGKPLMPTCRFGKVRRMLKSGQAKAVDTLPFTIQLTYKPRTRILQPVTLGQDPGRTNIGMAAVRFDGKELGRFHCITRNKEIPKLMADRMAARKASRRGERLARKRLARKLHTTAKHLNGRILPGCSEPIAVKDIINTESRFNNRPKRKCKYVDPKTGEVCGANTPRKEKVRDLLLWDICQHLPVEPEQRLAILSYVNQVNIVRPEVLACLALEERALLENHRALARASKSKPLPQLLCELKIKKQLQSQILAIASGDPERKAADLKGRMAFCRKHFLLHHQQTRIPKPSAWLTPTATQLLRTHINLFRKLSGILPVTDVAVELNKFAFMQLDNPEMKKREIDFCHGPLCGTGGLEAAVKEQQDGKCLLCGKESIGHYHHIVPRSRRGSNTIANIAGLCPKCHELVHKDADTAESLTEMKTGLMKKYGGTSVLNQIIPKLVETLADLFPGHFHVTNGWNTKEFREKHHLEKDHDVDAYCIACSHLKPEETLVETEPFEILQFRKHNRAIIHHQTERTYKLDGVTVAKNRKKRMEQKTDSLEDWYVDMAKEHGKTQADAMRSRLTVIKSTRYYNTPGRMMLRDLIKTIDGRIGYVRKINSGRKPKPGQKPVRILTLSHKPQGKEGQFSTSANKVRILTKNTGLVFVA

SEQ ID NO: 25261 - protein, 642 aa, synthetic construct
  REGION 1..642: note = Engineered IscB
MRYVYVLDVDGKPLMPTCRFGKVRRMLKSGQAKAVDTLPFTIQLTYKPRTRILQPVTLGQDPGRTNIGMAAVRFDGKELGRFHCITRNKEIPKLMADRMAARKASRRGERLARKRLARKLHTTAKHLNGRILPGCSEPIAVKDIINTESRFNNRPKRKCKYVDPKTGEVCGANTPRKEKVRDLLLWDICQHLPVEPEQRLAILSYVNQVNIVRPEVLACLALEERALLENHRALARASKSKPLPQLLCELKIKKQLQSQILAIASGDPERKAADLKGRMAFCRKHFLLHHQQTRIPKPSAWLTPTATQLLRTHINLFRKLSGILPVTDVAVELNKFAFMQLDNPEMKKREIDFCHGPLCGTGGLEAAVKEQQDGKCLLCGKESIGHYHHIVPRSRRGSNTIANIAGLCPKCHELVHKDADTAESLTEMKTGLMKKYGGTSVLNQIIPKLVETLADLFPGHFHVTNGWNTKEFREKHHLEKDHDVDAYCIACSHLKPEETLVETEPFEILQFRKHNRAIIHHQTERTYKLDGVTVAKNRKKRMEQKTDSLEDWYVDMAKEHGKTQADAMRSRLTVIKSTRYYNTPGRMMPGDLVECDAGRGRVTKNHSNCTLTVELLDSGKEVTRLAKSFRILTKNTGLVFVA

SEQ ID NO: 25262 - protein, 725 aa, synthetic construct
  REGION 1..725: note = Engineered IscB
MRYVYVLDVDGKPLMPTCRFGKVRRMLKSGQAKAVDTLPFTIQLTYKPRTRILQPVTLGQDPGRTNIGMAAVRFDGKELGRFHCITRNKEIPKLMADRMAARKASRRGERLARKRLARKLHTTAKHLNGRILPGCSEPIAVKDIINTESRFNNRPKRKCKYVDPKTGEVCGANTPRKEKVRDLLLWDICQHLPVEPEQRLAILSYVNQVNIVRPEVLACLALEERALLENHRALARASKSKPLPQLLCELKIKKQLQSQILAIASGDPERKAADLKGRMAFCRKHFLLHHQQTRIPKPSAWLTPTATQLLRTHINLFRKLSGILPVTDVAVELNKFAFMQLDNPEMKKREIDFCHGPLCGTGGLEAAVKEQQDGKCLLCGKESIGHYHHIVPRSRRGSNTIANIAGLCPKCHELVHKDADTAESLTEMKTGLMKKYGGTSVLNQIIPKLVETLADLFPGHFHVTNGWNTKEFREKHHLEKDHDVDAYCIAVGTALIKKYPKLESEFVYGDYKVYDVRKMIAKSEQEIGKATAKYFFYSNIMNFFKTEITLANGEIRKRPLIETNGETGEIVWDKGRDFATVRKVLSMPQVFEILQFRKHNRAIIHHQTERTYKLDGVTVAKNRKKRMEQKTDSLEDWYVDMAKEHGKTQADAMRSRLTVIKSTRYYNTPGRMMPGTVFLYEGKRYVMTGQITNGKYYRAYGQEKRNFPAVKVRILTKNTGLVFVA

SEQ ID NO: 25263 - DNA, 3169 bp, synthetic construct
  misc_feature 1..3169: note = Engineered IscB
  source 1..3169: mol_type = other DNA
gttaccagtggctgctgccagtggcgataagtcgtgtcttaccgggttggactcaagacgatagttaccggataaggcgcagcggtcgggctgaacggggggttcgtgcacacagcccagcttggagcgaacgacctacaccgaactgagatacctacagcgtgagctatgagaaagcgccacgcttcccgaagggagaaaggcggacaggtatccggtaagcggcagggtcggaacaggagagcgcacgagggagcttccagggggaaacgcctggtatctttatagtcctgtcgggtttcgccacctctgacttgagcgtcgatttttgtgatgctcgtcaggggggcggagcctatggaaaaacgccagcaacgcggcctttttacggttcctggccttttgctggccttttgctcacatgttctttcctgcgttatcccctgattctgtggataaccgtattaccgcctttgagtgagctgataccgctcgccgcagccgaacgaccgagcgcagcgagtcagtgagcgaggaagcggaagagcgcccaatacgcaaaccgcctctccccgcgcgttggccgattcattaatgcagctggcacgacaggtttcccgactggaaagcgggcagtgagcgcaacgcaattaatgtgagttagctcactcattaggcaccccaggctttacactttatgcttccggctcgtatgttgtgtggaattgtgagcggataacaatttcacacaggaaacagctatgaccatgattacgccagagggcctatttcccatgattccttcatatttgcatatacgatacaaggctgttagagagataattggaattaatttgactgtaaacacaaagatattagtacaaaatacgtgacgtagaaagtaataatttcttgggtagtttgcagttttaaaattatgttttaaaatggactatcatatgcttaccgtaacttgaaagtatttcgatttcttggctttatatatcttgtggaaaggacgaaacaccatgtcttcctgggacgaagacaacaatggcattaagttaaggatttgagatggattttttccacctcagatacctgactttcgaaccattgacacgttatttttctcgtaacaattacgagataacagcatgactgcacctacaggtcttgtacagcttgtagtcaaactgcttcaggttgtgctgatgtaacgagtacaggtatagcttatcagactatacagtaacatccatctgtggatgaattattttcgaaaggaaaatcattttttggtaccgagctcgaattcactggccgtcgttttacaacgtcgtgactgggaaaaccctggcgttacccaacttaatcgccttgcagcacatccccctttcgccagctggcgtaatagcgaagaggcccgcaccgatcgcccttcccaacagttgcgcagcctgaatggcgaatggcgcctgatgcggtattttctccttacgcatctgtgcggtatttcacaccgcatatggtgcactctcagtacaatctgctctgatgccgcatagttaagccagccccgacacccgccaacacccgctgacgcgccctgacgggcttgtctgctcccggcatccgcttacagacaagctgtgaccgtctccgggagctgcatgtgtcagaggttttcaccgtcatcaccgaaacgcgcgagacgaaagggcctcgtgatacgcctatttttataggttaatgtcatgataataatggtttcttagacgtcaggtggcacttttcggggaaatgtgcgcggaacccctatttgtttatttttctaaatacattcaaatatgtatccgctcatgagacaataaccctgataaatgcttcaataatattgaaaaaggaagagtatgagtattcaacatttccgtgtcgcccttattcccttttttgcggcattttgccttcctgtttttgctcacccagaaacgctggtgaaagtaaaagatgctgaagatcagttgggtgcacgagtgggttacatcgaactggatctcaacagcggtaagatccttgagagttttcgccccgaagaacgttttccaatgatgagcacttttaaagttctgctatgtggcgcggtattatcccgtattgacgccgggcaagagcaactcggtcgccgcatacactattctcagaatgacttggttgagtactcaccagtcacagaaaagcatcttacggatggcatgacagtaagagaattatgcagtgctgccataaccatgagtgataacactgcggccaacttacttctgacaacgatcggaggaccgaaggagctaaccgcttttttgcacaacatgggggatcatgtaactcgccttgatcgttgggaaccggagctgaatgaagccataccaaacgacgagcgtgacaccacgatgcctgtagcaatggcaacaacgttgcgcaaactattaactggcgaactacttactctagcttcccggcaacaattaatagactggatggaggcggataaagttgcaggaccacttctgcgctcggcccttccggctggctggtttattgctgataaatctggagccggtgagcgtgggtctcgcggtatcattgcagcactggggccagatggtaagccctcccgtatcgtagttatctacacgacggggagtcaggcaactatggatgaacgaaatagacagatcgctgagataggtgcctcactgattaagcattggtaactgtcagaccaagtttactcatatatactttagattgatttaaaacttcatttttaatttaaaaggatctaggtgaagatcctttttgataatctcatgaccaaaatcccttaacgtgagttttcgttccactgagcgtcagaccccgtagaaaagatcaaaggatcttcttgagatcctttttttctgcgcgtaatctgctgcttgcaaacaaaaaaaccaccgctaccagcggtggtttgtttgccggatcaagagctaccaactctttttccgaaggtaactggcttcagcagagcgcagataccaaatactgttcttctagtgtagccgtagttaggccaccacttcaagaactctgtagcaccgcctacatacctcgctctgctaatcct

SEQ ID NO: 25264 - DNA, 7197 bp, synthetic construct
  misc_feature 1..7197: note = Engineered IscB
  source 1..7197: mol_type = other DNA
aatcagtgaggcacctatctcagcgatctgtctatttcgttcatccatagttgcctgactccccgtcgtgtagataactacgatacgggagggcttaccatctggccccagtgctgcaatgataccgcgagacccacgctcaccggctccagatttatcagcaataaaccagccagccggaagggccgagcgcagaagtggtcctgcaactttatccgcctccatccagtctattaattgttgccgggaagctagagtaagtagttcgccagttaatagtttgcgcaacgttgttgccattgctacaggcatcgtggtgtcacgctcgtcgtttggtatggcttcattcagctccggttcccaacgatcaaggcgagttacatgatcccccatgttgtgcaaaaaagcggttagctccttcggtcctccgatcgttgtcagaagtaagttggccgcagtgttatcactcatggttatggcagcactgcataattctcttactgtcatgccatccgtaagatgcttttctgtgactggtgagtactcaaccaagtcattctgagaatagtgtatgcggcgaccgagttgctcttgcccggcgtcaatacgggataataccgcgccacatagcagaactttaaaagtgctcatcattggaaaacgttcttcggggcgaaaactctcaaggatcttaccgctgttgagatccagttcgatgtaacccactcgtgcacccaactgatcttcagcatcttttactttcaccagcgtttctgggtgagcaaaaacaggaaggcaaaatgccgcaaaaaagggaataagggcgacacggaaatgttgaatactcatactcttcctttttcaatattattgaagcatttatcagggttattgtctcatgagcggatacatatttgaatgtatttagaaaaataaacaaataggggttccgcgcacatttccccgaaaagtgccacctgacgtcgacggatcgggagatctcccgatcccctatggtgcactctcagtacaatctgctctgatgccgcatagttaagccagtatctgctccctgcttgtgtgttggaggtcgctgagtagtgcgcgagcaaaatttaagctacaacaaggcaaggcttgaccgacaattgcatgaagaatctgcttagggttaggcgttttgcgctgcttcgcgatgtacgggccagatatacgcgttgacattgattattgactagttattaatagtaatcaattacggggtcattagttcatagcccatatatggagttccgcgttacataacttacggtaaatggcccgcctggctgaccgcccaacgacccccgcccattgacgtcaataatgacgtatgttcccatagtaacgccaatagggactttccattgacgtcaatgggtggagtatttacggtaaactgcccacttggcagtacatcaagtgtatcatatgccaagtacgccccctattgacgtcaatgacggtaaatggcccgcctggcattatgcccagtacatgaccttatgggactttcctacttggcagtacatctacgtattagtcatcgctattaccatggtgatgcggttttggcagtacatcaatgggcgtggatagcggtttgactcacggggatttccaagtctccaccccattgacgtcaatgggagtttgttttggcaccaaaatcaacgggactttccaaaatgtcgtaacaactccgccccattgacgcaaatgggcggtaggcgtgtacggtgggaggtctatataagcagagctctctggctaactagagaacccactgcttactggcttatcgaaattaatacgactcactatagggagacccaagctggctagcgtttaaacttaagcttgccaccatgggatctccaaaaaagaaacggaaggtgggatctaagtacgtgtacatcgtggacaaacacggcaagcccctgatgcccaccacccggttcggccacgtgagaaagctgctgaaggaaggcaaagccgtggccatcagcaacaatcctttcaccatcagactcaagtacgacagcacacactacacccagcctgtgcacgagggaatcgacactggcagggaaaacatcggagatgctgcttctctcgaagatggcagaaacgtgtacctggccaacgtgaaaaccaataacaagagcatcaagaaacaaatgcaggaccggagctgctacagacgcgaacggcggcggcaccatagacagaacaagcagcggagagccaaccacgacggcaacagcatccaaaacggcgaggatgatgccgttagaaccaagcaccagtgcaagagcgttcagatctcctaccctaccgccacagagagcgtcatccacaaggtgatccggggaaaagaaggcaagttcgccaatagaaagcggcctgagggctggatcaccccatctgccagacagctgatccaactgaccatgaacgagatccagcagaccgctaagattctgcccgtgacccacatctctctggaaagagtggcctttgacttccagaagctggaaaaccagaatatcagaagatgggagtacggcaagggccctctgtacggctacaagacctacaaggattgtatctgggacaagcaaaatggtaagtgcgcctgctgcggcaagccaatcacacagtaccaccacatcatccacagggctgaaggcggaatcaacaacgtgaaaaatatcatcggactgtgtgacgactgccacgacgagattcacggattcgtggacgccgaggccagactgaaagagctgaaggaaggcgtgcggcagcggtattacatcggcctgctgaacagcgtgatccctgctctgatcgagacagtgtccgactactgcgacaagcacggcattgagttcaccgtgacagatggaaaacagacagccgaaaccagagaaaagtacggcttcaccaaggaccactgcatcgacgcttatacaatcagcctggctgatagaaacgtcagcaacaccgatatctgcaacaccatctaccagaaaagaagatttaagaaaaagagcaagaacatcgtggccgccaggaatcagcgggtgtataagctgaacggcaaagtgatcgcctacaacagacacaaggccaccaaccagaaagaggactccctggaggaattcctgaacgactaccggctgacacattctgaggacgcagtgcagagactgatgcacgatatcgagatcctgcctgccgtccggacctacacataccataagcagaagatcatcgccccttgtcacgccggcgacatcatcaagtacgagaagaacaacaaaattaagggcaacgtgaagtccatgatcttccccgctattagcgtgaagttcagcgaggtggccagaagcaagaaaggggtgaagtggaccgaaagagagtggaaggtgggcatcgacaacaatcacgtgcggaaggccaagttttgcatgcctatcgccagcggctgtctgcagaccatcgatagcgtgaacacagccgagtacctgtctaaactggccttcggatccaaaaggccggcggccacgaaaaaggccggccaggcaaaaaagaaaaagggatcttacccatacgatgttccagattacgcttacccatacgatgttccagattacgcttacccatacgatgttccagattacgcttgagcggccgctcgagtctagagggcccgtttaaacccgctgatcagcctcgactgtgccttctagttgccagccatctgttgtttgcccctcccccgtgccttccttgaccctggaaggtgccactcccactgtcctttcctaataaaatgaggaaattgcatcgcattgtctgagtaggtgtcattctattctggggggtggggtggggcaggacagcaagggggaggattgggaagacaatagcaggcatgctggggatgcggtgggctctatggcttctgaggcggaaagaaccagctggggctctagggggtatccccacgcgccctgtagcggcgcattaagcgcggcgggtgtggtggttacgcgcagcgtgaccgctacacttgccagcgccctagcgcccgctcctttcgctttcttcccttcctttctcgccacgttcgccggctttccccgtcaagctctaaatcgggggctccctttagggttccgatttagtgctttacggcacctcgaccccaaaaaacttgattagggtgatggttcacgtagtgggccatcgccctgatagacggtttttcgccctttgacgttggagtccacgttctttaatagtggactcttgttccaaactggaacaacactcaaccctatctcggtctattcttttgatttataagggattttgccgatttcggcctattggttaaaaaatgagctgatttaacaaaaatttaacgcgaattaattctgtggaatgtgtgtcagttagggtgtggaaagtccccaggctccccagcaggcagaagtatgcaaagcatgcatctcaattagtcagcaaccaggtgtggaaagtccccaggctccccagcaggcagaagtatgcaaagcatgcatctcaattagtcagcaaccatagtcccgcccctaactccgcccatcccgcccctaactccgcccagttccgcccattctccgccccatggctgactaattttttttatttatgcagaggccgaggccgcctctgcctctgagctattccagaagtagtgaggaggcttttttggaggcctaggcttttgcaaaaagctcccgggagcttgtatatccattttcggatctgatcaagagacaggatgaggatcgtttcgcatgattgaacaagatggattgcacgcaggttctccggccgcttgggtggagaggctattcggctatgactgggcacaacagacaatcggctgctctgatgccgccgtgttccggctgtcagcgcaggggcgcccggttctttttgtcaagaccgacctgtccggtgccctgaatgaactgcaggacgaggcagcgcggctatcgtggctggccacgacgggcgttccttgcgcagctgtgctcgacgttgtcactgaagcgggaagggactggctgctattgggcgaagtgccggggcaggatctcctgtcatctcaccttgctcctgccgagaaagtatccatcatggctgatgcaatgcggcggctgcatacgcttgatccggctacctgcccattcgaccaccaagcgaaacatcgcatcgagcgagcacgtactcggatggaagccggtcttgtcgatcaggatgatctggacgaagagcatcaggggctcgcgccagccgaactgttcgccaggctcaaggcgcgcatgcccgacggcgaggatctcgtcgtgacccatggcgatgcctgcttgccgaatatcatggtggaaaatggccgcttttctggattcatcgactgtggccggctgggtgtggcggaccgctatcaggacatagcgttggctacccgtgatattgctgaagagcttggcggcgaatgggctgaccgcttcctcgtgctttacggtatcgccgctcccgattcgcagcgcatcgccttctatcgccttcttgacgagttcttctgagcgggactctggggttcgaaatgaccgaccaagcgacgcccaacctgccatcacgagatttcgattccaccgccgccttctatgaaaggttgggcttcggaatcgttttccgggacgccggctggatgatcctccagcgcggggatctcatgctggagttcttcgcccaccccaacttgtttattgcagcttataatggttacaaataaagcaatagcatcacaaatttcacaaataaagcatttttttcactgcattctagttgtggtttgtccaaactcatcaatgtatcttatcatgtctgtataccgtcgacctctagctagagcttggcgtaatcatggtcatagctgtttcctgtgtgaaattgttatccgctcacaattccacacaacatacgagccggaagcataaagtgtaaagcctggggtgcctaatgagtgagctaactcacattaattgcgttgcgctcactgcccgctttccagtcgggaaacctgtcgtgccagctgcattaatgaatcggccaacgcgcggggagaggcggtttgcgtattgggcgctcttccgcttcctcgctcactgactcgctgcgctcggtcgttcggctgcggcgagcggtatcagctcactcaaaggcggtaatacggttatccacagaatcaggggataacgcaggaaagaacatgtgagcaaaaggccagcaaaaggccaggaaccgtaaaaaggccgcgttgctggcgtttttccataggctccgcccccctgacgagcatcacaaaaatcgacgctcaagtcagaggtggcgaaacccgacaggactataaagataccaggcgtttccccctggaagctccctcgtgcgctctcctgttccgaccctgccgcttaccggatacctgtccgcctttctcccttcgggaagcgtggcgctttctcatagctcacgctgtaggtatctcagttcggtgtaggtcgttcgctccaagctgggctgtgtgcacgaaccccccgttcagcccgaccgctgcgccttatccggtaactatcgtcttgagtccaacccggtaagacacgacttatcgccactggcagcagccactggtaacaggattagcagagcgaggtatgtaggcggtgctacagagttcttgaagtggtggcctaactacggctacactagaagaacagtatttggtatctgcgctctgctgaagccagttaccttcggaaaaagagttggtagctcttgatccggcaaacaaaccaccgctggtagcggtttttttgtttgcaagcagcagattacgcgcagaaaaaaaggatctcaagaagatcctttgatcttttctacggggtctgacgctcagtggaacgaaaactcacgttaagggattttggtcatgagattatcaaaaaggatcttcacctagatccttttaaattaaaaatgaagttttaaatcaatctaaagtatatatgagtaaacttggtctgacagttaccaatgctt

SEQ ID NO: 25265 - DNA, 3435 bp, synthetic construct
  misc_feature 1..3435: note = Engineered IscB
  source 1..3435: mol_type = other DNA
gttaccagtggctgctgccagtggcgataagtcgtgtcttaccgggttggactcaagacgatagttaccggataaggcgcagcggtcgggctgaacggggggttcgtgcacacagcccagcttggagcgaacgacctacaccgaactgagatacctacagcgtgagctatgagaaagcgccacgcttcccgaagggagaaaggcggacaggtatccggtaagcggcagggtcggaacaggagagcgcacgagggagcttccagggggaaacgcctggtatctttatagtcctgtcgggtttcgccacctctgacttgagcgtcgatttttgtgatgctcgtcaggggggcggagcctatggaaaaacgccagcaacgcggcctttttacggttcctggccttttgctggccttttgctcacatgttctttcctgcgttatcccctgattctgtggataaccgtattaccgcctttgagtgagctgataccgctcgccgcagccgaacgaccgagcgcagcgagtcagtgagcgaggaagcggaagagcgcccaatacgcaaaccgcctctccccgcgcgttggccgattcattaatgcagctggcacgacaggtttcccgactggaaagcgggcagtgagcgcaacgcaattaatgtgagttagctcactcattaggcaccccaggctttacactttatgcttccggctcgtatgttgtgtggaattgtgagcggataacaatttcacacaggaaacagctatgaccatgattacgccagagggcctatttcccatgattccttcatatttgcatatacgatacaaggctgttagagagataattggaattaatttgactgtaaacacaaagatattagtacaaaatacgtgacgtagaaagtaataatttcttgggtagtttgcagttttaaaattatgttttaaaatggactatcatatgcttaccgtaacttgaaagtatttcgatttcttggctttatatatcttgtggaaaggacgaaacaccatgtcttcctgggacgaagacaagtcaataacccgcgcccgaggtaaacctcggacggggcttgcaaaagaataagttttcttatttccacttttgtttagccccgttacagtttacggaaggctgttggctgtaaagccttattaatagcgccggggtcacccgtcgttaccacataaggcttacagccttattgattagccttggtagtaaagaagccggccaaaccaggtcaggtaaatctttaactgctacgttaccggtaaaataggcaccgtgggatgctcctcaagtctcacgctctgcggtatgctgttaaacatctcttagggtaggagaagtgcagtatacgctaaactatcggataacattggcgatgaggacaaccgattctgactaggcgccggcttgccggagccgaaaagatagagaacctgtatggactgcttttaaatatcttcggatgtttggaagcggttggtgcagaaggcgtaagtcatcccggcttgccgggaaaatataagaataaaagttttttggtaccgagctcgaattcactggccgtcgttttacaacgtcgtgactgggaaaaccctggcgttacccaacttaatcgccttgcagcacatccccctttcgccagctggcgtaatagcgaagaggcccgcaccgatcgcccttcccaacagttgcgcagcctgaatggcgaatggcgcctgatgcggtattttctccttacgcatctgtgcggtatttcacaccgcatatggtgcactctcagtacaatctgctctgatgccgcatagttaagccagccccgacacccgccaacacccgctgacgcgccctgacgggcttgtctgctcccggcatccgcttacagacaagctgtgaccgtctccgggagctgcatgtgtcagaggttttcaccgtcatcaccgaaacgcgcgagacgaaagggcctcgtgatacgcctatttttataggttaatgtcatgataataatggtttcttagacgtcaggtggcacttttcggggaaatgtgcgcggaacccctatttgtttatttttctaaatacattcaaatatgtatccgctcatgagacaataaccctgataaatgcttcaataatattgaaaaaggaagagtatgagtattcaacatttccgtgtcgcccttattcccttttttgcggcattttgccttcctgtttttgctcacccagaaacgctggtgaaagtaaaagatgctgaagatcagttgggtgcacgagtgggttacatcgaactggatctcaacagcggtaagatccttgagagttttcgccccgaagaacgttttccaatgatgagcacttttaaagttctgctatgtggcgcggtattatcccgtattgacgccgggcaagagcaactcggtcgccgcatacactattctcagaatgacttggttgagtactcaccagtcacagaaaagcatcttacggatggcatgacagtaagagaattatgcagtgctgccataaccatgagtgataacactgcggccaacttacttctgacaacgatcggaggaccgaaggagctaaccgcttttttgcacaacatgggggatcatgtaactcgccttgatcgttgggaaccggagctgaatgaagccataccaaacgacgagcgtgacaccacgatgcctgtagcaatggcaacaacgttgcgcaaactattaactggcgaactacttactctagcttcccggcaacaattaatagactggatggaggcggataaagttgcaggaccacttctgcgctcggcccttccggctggctggtttattgctgataaatctggagccggtgagcgtgggtctcgcggtatcattgcagcactggggccagatggtaagccctcccgtatcgtagttatctacacgacggggagtcaggcaactatggatgaacgaaatagacagatcgctgagataggtgcctcactgattaagcattggtaactgtcagaccaagtttactcatatatactttagattgatttaaaacttcatttttaatttaaaaggatctaggtgaagatcctttttgataatctcatgaccaaaatcccttaacgtgagttttcgttccactgagcgtcagaccccgtagaaaagatcaaaggatcttcttgagatcctttttttctgcgcgtaatctgctgcttgcaaacaaaaaaaccaccgctaccagcggtggtttgtttgccggatcaagagctaccaactctttttccgaaggtaactggcttcagcagagcgcagataccaaatactgttcttctagtgtagccgtagttaggccaccacttcaagaactctgtagcaccgcctacatacctcgctctgctaatcct

SEQ ID NO: 25266 - DNA, 6903 bp, synthetic construct
  misc_feature 1..6903: note = Engineered IscB
  source 1..6903: mol_type = other DNA
aatcagtgaggcacctatctcagcgatctgtctatttcgttcatccatagttgcctgactccccgtcgtgtagataactacgatacgggagggcttaccatctggccccagtgctgcaatgataccgcgagacccacgctcaccggctccagatttatcagcaataaaccagccagccggaagggccgagcgcagaagtggtcctgcaactttatccgcctccatccagtctattaattgttgccgggaagctagagtaagtagttcgccagttaatagtttgcgcaacgttgttgccattgctacaggcatcgtggtgtcacgctcgtcgtttggtatggcttcattcagctccggttcccaacgatcaaggcgagttacatgatcccccatgttgtgcaaaaaagcggttagctccttcggtcctccgatcgttgtcagaagtaagttggccgcagtgttatcactcatggttatggcagcactgcataattctcttactgtcatgccatccgtaagatgcttttctgtgactggtgagtactcaaccaagtcattctgagaatagtgtatgcggcgaccgagttgctcttgcccggcgtcaatacgggataataccgcgccacatagcagaactttaaaagtgctcatcattggaaaacgttcttcggggcgaaaactctcaaggatcttaccgctgttgagatccagttcgatgtaacccactcgtgcacccaactgatcttcagcatcttttactttcaccagcgtttctgggtgagcaaaaacaggaaggcaaaatgccgcaaaaaagggaataagggcgacacggaaatgttgaatactcatactcttcctttttcaatattattgaagcatttatcagggttattgtctcatgagcggatacatatttgaatgtatttagaaaaataaacaaataggggttccgcgcacatttccccgaaaagtgccacctgacgtcgacggatcgggagatctcccgatcccctatggtgcactctcagtacaatctgctctgatgccgcatagttaagccagtatctgctccctgcttgtgtgttggaggtcgctgagtagtgcgcgagcaaaatttaagctacaacaaggcaaggcttgaccgacaattgcatgaagaatctgcttagggttaggcgttttgcgctgcttcgcgatgtacgggccagatatacgcgttgacattgattattgactagttattaatagtaatcaattacggggtcattagttcatagcccatatatggagttccgcgttacataacttacggtaaatggcccgcctggctgaccgcccaacgacccccgcccattgacgtcaataatgacgtatgttcccatagtaacgccaatagggactttccattgacgtcaatgggtggagtatttacggtaaactgcccacttggcagtacatcaagtgtatcatatgccaagtacgccccctattgacgtcaatgacggtaaatggcccgcctggcattatgcccagtacatgaccttatgggactttcctacttggcagtacatctacgtattagtcatcgctattaccatggtgatgcggttttggcagtacatcaatgggcgtggatagcggtttgactcacggggatttccaagtctccaccccattgacgtcaatgggagtttgttttggcaccaaaatcaacgggactttccaaaatgtcgtaacaactccgccccattgacgcaaatgggcggtaggcgtgtacggtgggaggtctatataagcagagctctctggctaactagagaacccactgcttactggcttatcgaaattaatacgactcactatagggagacccaagctggctagcgtttaaacttaagcttgccaccatgggatctccaaaaaagaaacggaaggtgggatctagcgtcgccgttatctctaagaccggcgagcggctgatgcctaccagcgagtaccggaccagaaagctccttaaaagcggaaaggccatcaaatacagctaccaccccttcaccatccaactgaccgagagaaagaccggcaatatccagcccatcgagctgtgtatggacaccggctacatccacatcggaatcagtgtcaagtctgagaagcacgagtacctgacagagcagatcgacaccctgaccgatgaacggagcaggcacaacgccagaagaatgtaccgctcccagagaagaaacagaaagagatacagacagccaagattcaacaaccggaagaaggacaaaggctggatcgcccctagcctggagcacaaaaaaaacatccatgtgcaggccatcagccggatcaacaatgtgatgcccctgacagatatcaccatggaaatgggcaacttcgacacacaggtgctgaaagctaaggaggaaggcagacctctgccccagggcgtggactaccagcacggagaaagatactctatcgccacactgagagaagctgtgttcgccagagatggatataagtgtcagtgctgcggcagaaccatcaaggacggcgctatcctgcacgtgcaccacatcaagtacagatcccaaggcggaacaaacagcatcagcaacctggccaccgtgtgcgacaagtgccacacccctaagaaccacaagcctggcggcaagctgtatggctggaagcccaagctgccatcttttaagggcgccacattcatgaccaccatcagatggcagctgtacaacgaggccaaggctctgtttcctgacattgacatccacattacatacggcgccgctaccaaggaacggagaagagagctgaacatcgacaaatcccacatcaacgacgccttcgtgatgggccaatttcaccctagacatagaatcaaggccgtgctgtacaagaaaaagcggcggaacaaccgttgcctggaaaagttctacgacgccaagtacatcgattctagagatggcaagaagcggagcggccaggagctgttcaatggcagaatcaatagaaatcacaagaaagatagcgagaacctgcatcagtacagactgcagaaggtgacagccggcaagagaacagtgcggaagcagcactacagcgtgcagcctcacgacattatcatctacgagagccggaagcgggaaaccacaggttgtcactgcaacggcgccagggtgatgctgctgcctgataagaaaagcgtgtccatcaagaagatcaaaatttacagatatgccggaggatacttcaagagcaccttcaacggatccaaaaggccggcggccacgaaaaaggccggccaggcaaaaaagaaaaagggatcttacccatacgatgttccagattacgcttacccatacgatgttccagattacgcttacccatacgatgttccagattacgcttgagcggccgctcgagtctagagggcccgtttaaacccgctgatcagcctcgactgtgccttctagttgccagccatctgttgtttgcccctcccccgtgccttccttgaccctggaaggtgccactcccactgtcctttcctaataaaatgaggaaattgcatcgcattgtctgagtaggtgtcattctattctggggggtggggtggggcaggacagcaagggggaggattgggaagacaatagcaggcatgctggggatgcggtgggctctatggcttctgaggcggaaagaaccagctggggctctagggggtatccccacgcgccctgtagcggcgcattaagcgcggcgggtgtggtggttacgcgcagcgtgaccgctacacttgccagcgccctagcgcccgctcctttcgctttcttcccttcctttctcgccacgttcgccggctttccccgtcaagctctaaatcgggggctccctttagggttccgatttagtgctttacggcacctcgaccccaaaaaacttgattagggtgatggttcacgtagtgggccatcgccctgatagacggtttttcgccctttgacgttggagtccacgttctttaatagtggactcttgttccaaactggaacaacactcaaccctatctcggtctattcttttgatttataagggattttgccgatttcggcctattggttaaaaaatgagctgatttaacaaaaatttaacgcgaattaattctgtggaatgtgtgtcagttagggtgtggaaagtccccaggctccccagcaggcagaagtatgcaaagcatgcatctcaattagtcagcaaccaggtgtggaaagtccccaggctccccagcaggcagaagtatgcaaagcatgcatctcaattagtcagcaaccatagtcccgcccctaactccgcccatcccgcccctaactccgcccagttccgcccattctccgccccatggctgactaattttttttatttatgcagaggccgaggccgcctctgcctctgagctattccagaagtagtgaggaggcttttttggaggcctaggcttttgcaaaaagctcccgggagcttgtatatccattttcggatctgatcaagagacaggatgaggatcgtttcgcatgattgaacaagatggattgcacgcaggttctccggccgcttgggtggagaggctattcggctatgactgggcacaacagacaatcggctgctctgatgccgccgtgttccggctgtcagcgcaggggcgcccggttctttttgtcaagaccgacctgtccggtgccctgaatgaactgcaggacgaggcagcgcggctatcgtggctggccacgacgggcgttccttgcgcagctgtgctcgacgttgtcactgaagcgggaagggactggctgctattgggcgaagtgccggggcaggatctcctgtcatctcaccttgctcctgccgagaaagtatccatcatggctgatgcaatgcggcggctgcatacgcttgatccggctacctgcccattcgaccaccaagcgaaacatcgcatcgagcgagcacgtactcggatggaagccggtcttgtcgatcaggatgatctggacgaagagcatcaggggctcgcgccagccgaactgttcgccaggctcaaggcgcgcatgcccgacggcgaggatctcgtcgtgacccatggcgatgcctgcttgccgaatatcatggtggaaaatggccgcttttctggattcatcgactgtggccggctgggtgtggcggaccgctatcaggacatagcgttggctacccgtgatattgctgaagagcttggcggcgaatgggctgaccgcttcctcgtgctttacggtatcgccgctcccgattcgcagcgcatcgccttctatcgccttcttgacgagttcttctgagcgggactctggggttcgaaatgaccgaccaagcgacgcccaacctgccatcacgagatttcgattccaccgccgccttctatgaaaggttgggcttcggaatcgttttccgggacgccggctggatgatcctccagcgcggggatctcatgctggagttcttcgcccaccccaacttgtttattgcagcttataatggttacaaataaagcaatagcatcacaaatttcacaaataaagcatttttttcactgcattctagttgtggtttgtccaaactcatcaatgtatcttatcatgtctgtataccgtcgacctctagctagagcttggcgtaatcatggtcatagctgtttcctgtgtgaaattgttatccgctcacaattccacacaacatacgagccggaagcataaagtgtaaagcctggggtgcctaatgagtgagctaactcacattaattgcgttgcgctcactgcccgctttccagtcgggaaacctgtcgtgccagctgcattaatgaatcggccaacgcgcggggagaggcggtttgcgtattgggcgctcttccgcttcctcgctcactgactcgctgcgctcggtcgttcggctgcggcgagcggtatcagctcactcaaaggcggtaatacggttatccacagaatcaggggataacgcaggaaagaacatgtgagcaaaaggccagcaaaaggccaggaaccgtaaaaaggccgcgttgctggcgtttttccataggctccgcccccctgacgagcatcacaaaaatcgacgctcaagtcagaggtggcgaaacccgacaggactataaagataccaggcgtttccccctggaagctccctcgtgcgctctcctgttccgaccctgccgcttaccggatacctgtccgcctttctcccttcgggaagcgtggcgctttctcatagctcacgctgtaggtatctcagttcggtgtaggtcgttcgctccaagctgggctgtgtgcacgaaccccccgttcagcccgaccgctgcgccttatccggtaactatcgtcttgagtccaacccggtaagacacgacttatcgccactggcagcagccactggtaacaggattagcagagcgaggtatgtaggcggtgctacagagttcttgaagtggtggcctaactacggctacactagaagaacagtatttggtatctgcgctctgctgaagccagttaccttcggaaaaagagttggtagctcttgatccggcaaacaaaccaccgctggtagcggtttttttgtttgcaagcagcagattacgcgcagaaaaaaaggatctcaagaagatcctttgatcttttctacggggtctgacgctcagtggaacgaaaactcacgttaagggattttggtcatgagattatcaaaaaggatcttcacctagatccttttaaattaaaaatgaagttttaaatcaatctaaagtatatatgagtaaacttggtctgacagttaccaatgctt

SEQ ID NO: 25267 - DNA, 3210 bp, synthetic construct
  misc_feature 1..3210: note = Engineered IscB
  source 1..3210: mol_type = other DNA
gttaccagtggctgctgccagtggcgataagtcgtgtcttaccgggttggactcaagacgatagttaccggataaggcgcagcggtcgggctgaacggggggttcgtgcacacagcccagcttggagcgaacgacctacaccgaactgagatacctacagcgtgagctatgagaaagcgccacgcttcccgaagggagaaaggcggacaggtatccggtaagcggcagggtcggaacaggagagcgcacgagggagcttccagggggaaacgcctggtatctttatagtcctgtcgggtttcgccacctctgacttgagcgtcgatttttgtgatgctcgtcaggggggcggagcctatggaaaaacgccagcaacgcggcctttttacggttcctggccttttgctggccttttgctcacatgttctttcctgcgttatcccctgattctgtggataaccgtattaccgcctttgagtgagctgataccgctcgccgcagccgaacgaccgagcgcagcgagtcagtgagcgaggaagcggaagagcgcccaatacgcaaaccgcctctccccgcgcgttggccgattcattaatgcagctggcacgacaggtttcccgactggaaagcgggcagtgagcgcaacgcaattaatgtgagttagctcactcattaggcaccccaggctttacactttatgcttccggctcgtatgttgtgtggaattgtgagcggataacaatttcacacaggaaacagctatgaccatgattacgccagagggcctatttcccatgattccttcatatttgcatatacgatacaaggctgttagagagataattggaattaatttgactgtaaacacaaagatattagtacaaaatacgtgacgtagaaagtaataatttcttgggtagtttgcagttttaaaattatgttttaaaatggactatcatatgcttaccgtaacttgaaagtatttcgatttcttggctttatatatcttgtggaaaggacgaaacaccatgtcttcctgggacgaagacaagttttagaagaatgtaaatttataggtatctaaaacctcaaatttacagaagatacctataaatttttgaatattaaataaaaatagaattaggataaaacctacattattatgagataatatactgttgtgtaactctagcagcagctatatcgctgaaatctaaacatccattatattcaacacattcttattggaagtgattaagtattataaactcataataattttttcaaagagtattaccagctataagctgagatttatttaaggaaaataaggtattttttggtaccgagctcgaattcactggccgtcgttttacaacgtcgtgactgggaaaaccctggcgttacccaacttaatcgccttgcagcacatccccctttcgccagctggcgtaatagcgaagaggcccgcaccgatcgcccttcccaacagttgcgcagcctgaatggcgaatggcgcctgatgcggtattttctccttacgcatctgtgcggtatttcacaccgcatatggtgcactctcagtacaatctgctctgatgccgcatagttaagccagccccgacacccgccaacacccgctgacgcgccctgacgggcttgtctgctcccggcatccgcttacagacaagctgtgaccgtctccgggagctgcatgtgtcagaggttttcaccgtcatcaccgaaacgcgcgagacgaaagggcctcgtgatacgcctatttttataggttaatgtcatgataataatggtttcttagacgtcaggtggcacttttcggggaaatgtgcgcggaacccctatttgtttatttttctaaatacattcaaatatgtatccgctcatgagacaataaccctgataaatgcttcaataatattgaaaaaggaagagtatgagtattcaacatttccgtgtcgcccttattcccttttttgcggcattttgccttcctgtttttgctcacccagaaacgctggtgaaagtaaaagatgctgaagatcagttgggtgcacgagtgggttacatcgaactggatctcaacagcggtaagatccttgagagttttcgccccgaagaacgttttccaatgatgagcacttttaaagttctgctatgtggcgcggtattatcccgtattgacgccgggcaagagcaactcggtcgccgcatacactattctcagaatgacttggttgagtactcaccagtcacagaaaagcatcttacggatggcatgacagtaagagaattatgcagtgctgccataaccatgagtgataacactgcggccaacttacttctgacaacgatcggaggaccgaaggagctaaccgcttttttgcacaacatgggggatcatgtaactcgccttgatcgttgggaaccggagctgaatgaagccataccaaacgacgagcgtgacaccacgatgcctgtagcaatggcaacaacgttgcgcaaactattaactggcgaactacttactctagcttcccggcaacaattaatagactggatggaggcggataaagttgcaggaccacttctgcgctcggcccttccggctggctggtttattgctgataaatctggagccggtgagcgtgggtctcgcggtatcattgcagcactggggccagatggtaagccctcccgtatcgtagttatctacacgacggggagtcaggcaactatggatgaacgaaatagacagatcgctgagataggtgcctcactgattaagcattggtaactgtcagaccaagtttactcatatatactttagattgatttaaaacttcatttttaatttaaaaggatctaggtgaagatcctttttgataatctcatgaccaaaatcccttaacgtgagttttcgttccactgagcgtcagaccccgtagaaaagatcaaaggatcttcttgagatcctttttttctgcgcgtaatctgctgcttgcaaacaaaaaaaccaccgctaccagcggtggtttgtttgccggatcaagagctaccaactctttttccgaaggtaactggcttcagcagagcgcagataccaaatactgttcttctagtgtagccgtagttaggccaccacttcaagaactctgtagcaccgcctacatacctcgctctgctaatcct

SEQ ID NO: 25268 - DNA, 6859 bp, synthetic construct
  misc_feature 1..6859: note = Engineered IscB
  source 1..6859: mol_type = other DNA
aatcagtgaggcacctatctcagcgatctgtctatttcgttcatccatagttgcctgactccccgtcgtgtagataactacgatacgggagggcttaccatctggccccagtgctgcaatgataccgcgagacccacgctcaccggctccagatttatcagcaataaaccagccagccggaagggccgagcgcagaagtggtcctgcaactttatccgcctccatccagtctattaattgttgccgggaagctagagtaagtagttcgccagttaatagtttgcgcaacgttgttgccattgctacaggcatcgtggtgtcacgctcgtcgtttggtatggcttcattcagctccggttcccaacgatcaaggcgagttacatgatcccccatgttgtgcaaaaaagcggttagctccttcggtcctccgatcgttgtcagaagtaagttggccgcagtgttatcactcatggttatggcagcactgcataattctcttactgtcatgccatccgtaagatgcttttctgtgactggtgagtactcaaccaagtcattctgagaatagtgtatgcggcgaccgagttgctcttgcccggcgtcaatacgggataataccgcgccacatagcagaactttaaaagtgctcatcattggaaaacgttcttcggggcgaaaactctcaaggatcttaccgctgttgagatccagttcgatgtaacccactcgtgcacccaactgatcttcagcatcttttactttcaccagcgtttctgggtgagcaaaaacaggaaggcaaaatgccgcaaaaaagggaataagggcgacacggaaatgttgaatactcatactcttcctttttcaatattattgaagcatttatcagggttattgtctcatgagcggatacatatttgaatgtatttagaaaaataaacaaataggggttccgcgcacatttccccgaaaagtgccacctgacgtcgacggatcgggagatctcccgatcccctatggtgcactctcagtacaatctgctctgatgccgcatagttaagccagtatctgctccctgcttgtgtgttggaggtcgctgagtagtgcgcgagcaaaatttaagctacaacaaggcaaggcttgaccgacaattgcatgaagaatctgcttagggttaggcgttttgcgctgcttcgcgatgtacgggccagatatacgcgttgacattgattattgactagttattaatagtaatcaattacggggtcattagttcatagcccatatatggagttccgcgttacataacttacggtaaatggcccgcctggctgaccgcccaacgacccccgcccattgacgtcaataatgacgtatgttcccatagtaacgccaatagggactttccattgacgtcaatgggtggagtatttacggtaaactgcccacttggcagtacatcaagtgtatcatatgccaagtacgccccctattgacgtcaatgacggtaaatggcccgcctggcattatgcccagtacatgaccttatgggactttcctacttggcagtacatctacgtattagtcatcgctattaccatggtgatgcggttttggcagtacatcaatgggcgtggatagcggtttgactcacggggatttccaagtctccaccccattgacgtcaatgggagtttgttttggcaccaaaatcaacgggactttccaaaatgtcgtaacaactccgccccattgacgcaaatgggcggtaggcgtgtacggtgggaggtctatataagcagagctctctggctaactagagaacccactgcttactggcttatcgaaattaatacgactcactatagggagacccaagctggctagcgtttaaacttaagcttgccaccatgggatctccaaaaaagaaacggaaggtgggatctaacaccatcctggtgctgagcagcatcaagattcctctgatgcctagccaccccgccagagccagacagctgatccaaagcggaaaggctaaggtgtaccggcacaaccccttcactatcatcctgaccgagagaaatcaaggcaatatccagccaatcgaatgcaagatcgatcctggcagccagaccacaggaatggccctggtcgtgcagggcaaaaagcagacaaaggccctgctgggaattcacctcaagcacagaggcaaacacatcacccaggccctgaaaaaaagaagcgtttctagaaagtttagaagaagcagaaaaaccagatacagacctccaagatttctgaaccgcacaagacccatcggctggctgcctcctagcattaactctcgactgaacaacatcaccaactgggtgcggaagctgaaggtgtgggcccctctaagctccatcgaggtggaaaacgtgaagttcgacatccagaagctgcagaaccctgaaatccagggcatcgagtaccagcagggtacactgatgggctacgaggtgcgggaatacatcctggaaaagttccataagacctgcgcctactgcggccagaccaagggcagactggagatcgatcacatcatccccaagtctaagggaggcagcaaccggatgagcaacctgaccctcgcctgtcagcggtgcaaccagaagaagggcaaccagagcctgaccgagttcgtgaaaaacaaacagaaactggaaaaaatcaaggcccagtgtagaacatcattcaaggacgccgctatcgtgaactccatgagaaaggccctggtgtctacactgaagaagttccacctgccagtgtactgctggagctctggcctgaccaagtataacagagtgagacagaactacgagaagcaccactggatcgatgctgcttgtgtgggcaatagcggcagcaatgtgtgcctgcctagaaactccagcgtgctgaccatcaccgccatgggacggggtaatcggaaaaagtgccagatgaacaagtacggcttccccaagagcaagcctaagcaggccaagcgggtgcacggcctggacaccggcgactgggtcaagatccgggccctgtctcctgagcagaacgccaataggaacgagaagaatcaaatcaccagacctgtgtacggcagggtcaccgtgcgggctacaggcaacttcgccgtgacacccaagaacggcaaacaggtgtccatcatgtacaagtactgcttcctgctgcaaaaaaacgacggctacaactatacaggatccaaaaggccggcggccacgaaaaaggccggccaggcaaaaaagaaaaagggatcttacccatacgatgttccagattacgcttacccatacgatgttccagattacgcttacccatacgatgttccagattacgcttgaggccgctcgagtctagagggcccgtttaaacccgctgatcagcctcgactgtgccttctagttgccagccatctgttgtttgcccctcccccgtgccttccttgaccctggaaggtgccactcccactgtcctttcctaataaaatgaggaaattgcatcgcattgtctgagtaggtgtcattctattctggggggtggggtggggcaggacagcaagggggaggattgggaagacaatagcaggcatgctggggatgcggtgggctctatggcttctgaggcggaaagaaccagctggggctctagggggtatccccacgcgccctgtagcggcgcattaagcgcggcgggtgtggtggttacgcgcagcgtgaccgctacacttgccagcgccctagcgcccgctcctttcgctttcttcccttcctttctcgccacgttcgccggctttccccgtcaagctctaaatcgggggctccctttagggttccgatttagtgctttacggcacctcgaccccaaaaaacttgattagggtgatggttcacgtagtgggccatcgccctgatagacggtttttcgccctttgacgttggagtccacgttctttaatagtggactcttgttccaaactggaacaacactcaaccctatctcggtctattcttttgatttataagggattttgccgatttcggcctattggttaaaaaatgagctgatttaacaaaaatttaacgcgaattaattctgtggaatgtgtgtcagttagggtgtggaaagtccccaggctccccagcaggcagaagtatgcaaagcatgcatctcaattagtcagcaaccaggtgtggaaagtccccaggctccccagcaggcagaagtatgcaaagcatgcatctcaattagtcagcaaccatagtcccgcccctaactccgcccatcccgcccctaactccgcccagttccgcccattctccgccccatggctgactaattttttttatttatgcagaggccgaggccgcctctgcctctgagctattccagaagtagtgaggaggcttttttggaggcctaggcttttgcaaaaagctcccgggagcttgtatatccattttcggatctgatcaagagacaggatgaggatcgtttcgcatgattgaacaagatggattgcacgcaggttctccggccgcttgggtggagaggctattcggctatgactgggcacaacagacaatcggctgctctgatgccgccgtgttccggctgtcagcgcaggggcgcccggttctttttgtcaagaccgacctgtccggtgccctgaatgaactgcaggacgaggcagcgcggctatcgtggctggccacgacgggcgttccttgcgcagctgtgctcgacgttgtcactgaagcgggaagggactggctgctattgggcgaagtgccggggcaggatctcctgtcatctcaccttgctcctgccgagaaagtatccatcatggctgatgcaatgcggcggctgcatacgcttgatccggctacctgcccattcgaccaccaagcgaaacatcgcatcgagcgagcacgtactcggatggaagccggtcttgtcgatcaggatgatctggacgaagagcatcaggggctcgcgccagccgaactgttcgccaggctcaaggcgcgcatgcccgacggcgaggatctcgtcgtgacccatggcgatgcctgcttgccgaatatcatggtggaaaatggccgcttttctggattcatcgactgtggccggctgggtgtggcggaccgctatcaggacatagcgttggctacccgtgatattgctgaagagcttggcggcgaatgggctgaccgcttcctcgtgctttacggtatcgccgctcccgattcgcagcgcatcgccttctatcgccttcttgacgagttcttctgagcgggactctggggttcgaaatgaccgaccaagcgacgcccaacctgccatcacgagatttcgattccaccgccgccttctatgaaaggttgggcttcggaatcgttttccgggacgccggctggatgatcctccagcgcggggatctcatgctggagttcttcgcccaccccaacttgtttattgcagcttataatggttacaaataaagcaatagcatcacaaatttcacaaataaagcatttttttcactgcattctagttgtggtttgtccaaactcatcaatgtatcttatcatgtctgtataccgtcgacctctagctagagcttggcgtaatcatggtcatagctgtttcctgtgtgaaattgttatccgctcacaattccacacaacatacgagccggaagcataaagtgtaaagcctggggtgcctaatgagtgagctaactcacattaattgcgttgcgctcactgcccgctttccagtcgggaaacctgtcgtgccagctgcattaatgaatcggccaacgcgcggggagaggcggtttgcgtattgggcgctcttccgcttcctcgctcactgactcgctgcgctcggtcgttcggctgcggcgagcggtatcagctcactcaaaggcggtaatacggttatccacagaatcaggggataacgcaggaaagaacatgtgagcaaaaggccagcaaaaggccaggaaccgtaaaaaggccgcgttgctggcgtttttccataggctccgcccccctgacgagcatcacaaaaatcgacgctcaagtcagaggtggcgaaacccgacaggactataaagataccaggcgtttccccctggaagctccctcgtgcgctctcctgttccgaccctgccgcttaccggatacctgtccgcctttctcccttcgggaagcgtggcgctttctcatagctcacgctgtaggtatctcagttcggtgtaggtcgttcgctccaagctgggctgtgtgcacgaaccccccgttcagcccgaccgctgcgccttatccggtaactatcgtcttgagtccaacccggtaagacacgacttatcgccactggcagcagccactggtaacaggattagcagagcgaggtatgtaggcggtgctacagagttcttgaagtggtggcctaactacggctacactagaagaacagtatttggtatctgcgctctgctgaagccagttaccttcggaaaaagagttggtagctcttgatccggcaaacaaaccaccgctggtagcggtttttttgtttgcaagcagcagattacgcgcagaaaaaaaggatctcaagaagatcctttgatcttttctacggggtctgacgctcagtggaacgaaaactcacgttaagggattttggtcatgagattatcaaaaaggatcttcacctagatccttttaaattaaaaatgaagttttaaatcaatctaaagtatatatgagtaaacttggtctgacagttaccaatgctt

SEQ ID NO: 25269 - DNA, 3314 bp, synthetic construct
  misc_feature 1..3314: note = Engineered IscB
  source 1..3314: mol_type = other DNA
gttaccagtggctgctgccagtggcgataagtcgtgtcttaccgggttggactcaagacgatagttaccggataaggcgcagcggtcgggctgaacggggggttcgtgcacacagcccagcttggagcgaacgacctacaccgaactgagatacctacagcgtgagctatgagaaagcgccacgcttcccgaagggagaaaggcggacaggtatccggtaagcggcagggtcggaacaggagagcgcacgagggagcttccagggggaaacgcctggtatctttatagtcctgtcgggtttcgccacctctgacttgagcgtcgatttttgtgatgctcgtcaggggggcggagcctatggaaaaacgccagcaacgcggcctttttacggttcctggccttttgctggccttttgctcacatgttctttcctgcgttatcccctgattctgtggataaccgtattaccgcctttgagtgagctgataccgctcgccgcagccgaacgaccgagcgcagcgagtcagtgagcgaggaagcggaagagcgcccaatacgcaaaccgcctctccccgcgcgttggccgattcattaatgcagctggcacgacaggtttcccgactggaaagcgggcagtgagcgcaacgcaattaatgtgagttagctcactcattaggcaccccaggctttacactttatgcttccggctcgtatgttgtgtggaattgtgagcggataacaatttcacacaggaaacagctatgaccatgattacgccagagggcctatttcccatgattccttcatatttgcatatacgatacaaggctgttagagagataattggaattaatttgactgtaaacacaaagatattagtacaaaatacgtgacgtagaaagtaataatttcttgggtagtttgcagttttaaaattatgttttaaaatggactatcatatgcttaccgtaacttgaaagtatttcgatttcttggctttatatatcttgtggaaaggacgaaacaccatgtcttcctgggacgaagacaagtcaatgacccattttcaataacacaatgagcaagcgaagcggggagttttgctccccaaatccagagctcctttacattgacccggctcagggacttctaagttcctacgttagcagttaatattataggtaccccagaatgcttcaccagttcgagggctctacggtaagtggttaaacaagtggaaggggttaaactagtgctgcttacataaacaactgcataacattgccaaggtgacgtgattcatactaagctctaagctagcatgagtcacaccaccatgcaagtgtgtaaatgcttttcgctcacttgcatgagagtgattgaaggtaactctagcataaccccttggggcctctaaacgggtcttgaggggttttttgttttttggtaccgagctcgaattcactggccgtcgttttacaacgtcgtgactgggaaaaccctggcgttacccaacttaatcgccttgcagcacatccccctttcgccagctggcgtaatagcgaagaggcccgcaccgatcgcccttcccaacagttgcgcagcctgaatggcgaatggcgcctgatgcggtattttctccttacgcatctgtgcggtatttcacaccgcatatggtgcactctcagtacaatctgctctgatgccgcatagttaagccagccccgacacccgccaacacccgctgacgcgccctgacgggcttgtctgctcccggcatccgcttacagacaagctgtgaccgtctccgggagctgcatgtgtcagaggttttcaccgtcatcaccgaaacgcgcgagacgaaagggcctcgtgatacgcctatttttataggttaatgtcatgataataatggtttcttagacgtcaggtggcacttttcggggaaatgtgcgcggaacccctatttgtttatttttctaaatacattcaaatatgtatccgctcatgagacaataaccctgataaatgcttcaataatattgaaaaaggaagagtatgagtattcaacatttccgtgtcgcccttattcccttttttgcggcattttgccttcctgtttttgctcacccagaaacgctggtgaaagtaaaagatgctgaagatcagttgggtgcacgagtgggttacatcgaactggatctcaacagcggtaagatccttgagagttttcgccccgaagaacgttttccaatgatgagcacttttaaagttctgctatgtggcgcggtattatcccgtattgacgccgggcaagagcaactcggtcgccgcatacactattctcagaatgacttggttgagtactcaccagtcacagaaaagcatcttacggatggcatgacagtaagagaattatgcagtgctgccataaccatgagtgataacactgcggccaacttacttctgacaacgatcggaggaccgaaggagctaaccgcttttttgcacaacatgggggatcatgtaactcgccttgatcgttgggaaccggagctgaatgaagccataccaaacgacgagcgtgacaccacgatgcctgtagcaatggcaacaacgttgcgcaaactattaactggcgaactacttactctagcttcccggcaacaattaatagactggatggaggcggataaagttgcaggaccacttctgcgctcggcccttccggctggctggtttattgctgataaatctggagccggtgagcgtgggtctcgcggtatcattgcagcactggggccagatggtaagccctcccgtatcgtagttatctacacgacggggagtcaggcaactatggatgaacgaaatagacagatcgctgagataggtgcctcactgattaagcattggtaactgtcagaccaagtttactcatatatactttagattgatttaaaacttcatttttaatttaaaaggatctaggtgaagatcctttttgataatctcatgaccaaaatcccttaacgtgagttttcgttccactgagcgtcagaccccgtagaaaagatcaaaggatcttcttgagatcctttttttctgcgcgtaatctgctgcttgcaaacaaaaaaaccaccgctaccagcggtggtttgtttgccggatcaagagctaccaactctttttccgaaggtaactggcttcagcagagcgcagataccaaatactgttcttctagtgtagccgtagttaggccaccacttcaagaactctgtagcaccgcctacatacctcgctctgctaatcct

SEQ ID NO: 25270 - DNA, 3324 bp, synthetic construct
  misc_feature 1..3324: note = Engineered IscB
  source 1..3324: mol_type = other DNA
gttaccagtggctgctgccagtggcgataagtcgtgtcttaccgggttggactcaagacgatagttaccggataaggcgcagcggtcgggctgaacggggggttcgtgcacacagcccagcttggagcgaacgacctacaccgaactgagatacctacagcgtgagctatgagaaagcgccacgcttcccgaagggagaaaggcggacaggtatccggtaagcggcagggtcggaacaggagagcgcacgagggagcttccagggggaaacgcctggtatctttatagtcctgtcgggtttcgccacctctgacttgagcgtcgatttttgtgatgctcgtcaggggggcggagcctatggaaaaacgccagcaacgcggcctttttacggttcctggccttttgctggccttttgctcacatgttctttcctgcgttatcccctgattctgtggataaccgtattaccgcctttgagtgagctgataccgctcgccgcagccgaacgaccgagcgcagcgagtcagtgagcgaggaagcggaagagcgcccaatacgcaaaccgcctctccccgcgcgttggccgattcattaatgcagctggcacgacaggtttcccgactggaaagcgggcagtgagcgcaacgcaattaatgtgagttagctcactcattaggcaccccaggctttacactttatgcttccggctcgtatgttgtgtggaattgtgagcggataacaatttcacacaggaaacagctatgaccatgattacgccagagggcctatttcccatgattccttcatatttgcatatacgatacaaggctgttagagagataattggaattaatttgactgtaaacacaaagatattagtacaaaatacgtgacgtagaaagtaataatttcttgggtagtttgcagttttaaaattatgttttaaaatggactatcatatgcttaccgtaacttgaaagtatttcgatttcttggctttatatatcttgtggaaaggacgaaacaccatgtcttcctgggacgaagacaaatttcgccctcgcattggtggacagcacgggttctggggcgatcagcgaggggagcgagggcgcgcgaggaatgagttggggacgcagtaggtatgtataggtttccaccagtgttgaagggcgaaagcagcccagccaagtctccgcccatggcggagcacgggaaaccggtggggaaacccggccggccaccgtaaggaggcacgtttggggaacaggtaggggtaaccctgagtgcaacctggggtgcaccttcagctccaggctctgcaaggctcggcccagaggattaacgccctaatccgcctctggcggaagggagagaaaggcggtcgtgaggccgcaaggcaagccgagccatactcctgtacccaaacctgagcgggaaggagaacaattttttggtaccgagctcgaattcactggccgtcgttttacaacgtcgtgactgggaaaaccctggcgttacccaacttaatcgccttgcagcacatccccctttcgccagctggcgtaatagcgaagaggcccgcaccgatcgcccttcccaacagttgcgcagcctgaatggcgaatggcgcctgatgcggtattttctccttacgcatctgtgcggtatttcacaccgcatatggtgcactctcagtacaatctgctctgatgccgcatagttaagccagccccgacacccgccaacacccgctgacgcgccctgacgggcttgtctgctcccggcatccgcttacagacaagctgtgaccgtctccgggagctgcatgtgtcagaggttttcaccgtcatcaccgaaacgcgcgagacgaaagggcctcgtgatacgcctatttttataggttaatgtcatgataataatggtttcttagacgtcaggtggcacttttcggggaaatgtgcgcggaacccctatttgtttatttttctaaatacattcaaatatgtatccgctcatgagacaataaccctgataaatgcttcaataatattgaaaaaggaagagtatgagtattcaacatttccgtgtcgcccttattcccttttttgcggcattttgccttcctgtttttgctcacccagaaacgctggtgaaagtaaaagatgctgaagatcagttgggtgcacgagtgggttacatcgaactggatctcaacagcggtaagatccttgagagttttcgccccgaagaacgttttccaatgatgagcacttttaaagttctgctatgtggcgcggtattatcccgtattgacgccgggcaagagcaactcggtcgccgcatacactattctcagaatgacttggttgagtactcaccagtcacagaaaagcatcttacggatggcatgacagtaagagaattatgcagtgctgccataaccatgagtgataacactgcggccaacttacttctgacaacgatcggaggaccgaaggagctaaccgcttttttgcacaacatgggggatcatgtaactcgccttgatcgttgggaaccggagctgaatgaagccataccaaacgacgagcgtgacaccacgatgcctgtagcaatggcaacaacgttgcgcaaactattaactggcgaactacttactctagcttcccggcaacaattaatagactggatggaggcggataaagttgcaggaccacttctgcgctcggcccttccggctggctggtttattgctgataaatctggagccggtgagcgtgggtctcgcggtatcattgcagcactggggccagatggtaagccctcccgtatcgtagttatctacacgacggggagtcaggcaactatggatgaacgaaatagacagatcgctgagataggtgcctcactgattaagcattggtaactgtcagaccaagtttactcatatatactttagattgatttaaaacttcatttttaatttaaaaggatctaggtgaagatcctttttgataatctcatgaccaaaatcccttaacgtgagttttcgttccactgagcgtcagaccccgtagaaaagatcaaaggatcttcttgagatcctttttttctgcgcgtaatctgctgcttgcaaacaaaaaaaccaccgctaccagcggtggtttgtttgccggatcaagagctaccaactctttttccgaaggtaactggcttcagcagagcgcagataccaaatactgttcttctagtgtagccgtagttaggccaccacttcaagaactctgtagcaccgcctacatacctcgctctgctaatcct

SEQ ID NO: 25271 - DNA, 3099 bp, synthetic construct
  misc_feature 1..3099: note = Engineered IscB
  source 1..3099: mol_type = other DNA
gttaccagtggctgctgccagtggcgataagtcgtgtcttaccgggttggactcaagacgatagttaccggataaggcgcagcggtcgggctgaacggggggttcgtgcacacagcccagcttggagcgaacgacctacaccgaactgagatacctacagcgtgagctatgagaaagcgccacgcttcccgaagggagaaaggcggacaggtatccggtaagcggcagggtcggaacaggagagcgcacgagggagcttccagggggaaacgcctggtatctttatagtcctgtcgggtttcgccacctctgacttgagcgtcgatttttgtgatgctcgtcaggggggcggagcctatggaaaaacgccagcaacgcggcctttttacggttcctggccttttgctggccttttgctcacatgttctttcctgcgttatcccctgattctgtggataaccgtattaccgcctttgagtgagctgataccgctcgccgcagccgaacgaccgagcgcagcgagtcagtgagcgaggaagcggaagagcgcccaatacgcaaaccgcctctccccgcgcgttggccgattcattaatgcagctggcacgacaggtttcccgactggaaagcgggcagtgagcgcaacgcaattaatgtgagttagctcactcattaggcaccccaggctttacactttatgcttccggctcgtatgttgtgtggaattgtgagcggataacaatttcacacaggaaacagctatgaccatgattacgccagagggcctatttcccatgattccttcatatttgcatatacgatacaaggctgttagagagataattggaattaatttgactgtaaacacaaagatattagtacaaaatacgtgacgtagaaagtaataatttcttgggtagtttgcagttttaaaattatgttttaaaatggactatcatatgcttaccgtaacttgaaagtatttcgatttcttggctttatatatcttgtggaaaggacgaaacaccatgtcttcctgggacgaagacaagttacagttaaggctctttgaaaatgatgattgaaacgaaaaaagagccttaattgtaaaacgcctatatgatgaaggaatgtacgcttgggtttgtccagcctaagccaaactaaaactacagtcgataatgacaccttcattgtgggttaggacattaaaaaaattttcagttttttggtaccgagctcgaattcactggccgtcgttttacaacgtcgtgactgggaaaaccctggcgttacccaacttaatcgccttgcagcacatccccctttcgccagctggcgtaatagcgaagaggcccgcaccgatcgcccttcccaacagttgcgcagcctgaatggcgaatggcgcctgatgcggtattttctccttacgcatctgtgcggtatttcacaccgcatatggtgcactctcagtacaatctgctctgatgccgcatagttaagccagccccgacacccgccaacacccgctgacgcgccctgacgggcttgtctgctcccggcatccgcttacagacaagctgtgaccgtctccgggagctgcatgtgtcagaggttttcaccgtcatcaccgaaacgcgcgagacgaaagggcctcgtgatacgcctatttttataggttaatgtcatgataataatggtttcttagacgtcaggtggcacttttcggggaaatgtgcgcggaacccctatttgtttatttttctaaatacattcaaatatgtatccgctcatgagacaataaccctgataaatgcttcaataatattgaaaaaggaagagtatgagtattcaacatttccgtgtcgcccttattcccttttttgcggcattttgccttcctgtttttgctcacccagaaacgctggtgaaagtaaaagatgctgaagatcagttgggtgcacgagtgggttacatcgaactggatctcaacagcggtaagatccttgagagttttcgccccgaagaacgttttccaatgatgagcacttttaaagttctgctatgtggcgcggtattatcccgtattgacgccgggcaagagcaactcggtcgccgcatacactattctcagaatgacttggttgagtactcaccagtcacagaaaagcatcttacggatggcatgacagtaagagaattatgcagtgctgccataaccatgagtgataacactgcggccaacttacttctgacaacgatcggaggaccgaaggagctaaccgcttttttgcacaacatgggggatcatgtaactcgccttgatcgttgggaaccggagctgaatgaagccataccaaacgacgagcgtgacaccacgatgcctgtagcaatggcaacaacgttgcgcaaactattaactggcgaactacttactctagcttcccggcaacaattaatagactggatggaggcggataaagttgcaggaccacttctgcgctcggcccttccggctggctggtttattgctgataaatctggagccggtgagcgtgggtctcgcggtatcattgcagcactggggccagatggtaagccctcccgtatcgtagttatctacacgacggggagtcaggcaactatggatgaacgaaatagacagatcgctgagataggtgcctcactgattaagcattggtaactgtcagaccaagtttactcatatatactttagattgatttaaaacttcatttttaatttaaaaggatctaggtgaagatcctttttgataatctcatgaccaaaatcccttaacgtgagttttcgttccactgagcgtcagaccccgtagaaaagatcaaaggatcttcttgagatcctttttttctgcgcgtaatctgctgcttgcaaacaaaaaaaccaccgctaccagcggtggtttgtttgccggatcaagagctaccaactctttttccgaaggtaactggcttcagcagagcgcagataccaaatactgttcttctagtgtagccgtagttaggccaccacttcaagaactctgtagcaccgcctacatacctcgctctgctaatcct

SEQ ID NO: 25272 - DNA, 3080 bp, synthetic construct
  misc_feature 1..3080: note = Engineered IscB
  source 1..3080: mol_type = other DNA
gttaccagtggctgctgccagtggcgataagtcgtgtcttaccgggttggactcaagacgatagttaccggataaggcgcagcggtcgggctgaacggggggttcgtgcacacagcccagcttggagcgaacgacctacaccgaactgagatacctacagcgtgagctatgagaaagcgccacgcttcccgaagggagaaaggcggacaggtatccggtaagcggcagggtcggaacaggagagcgcacgagggagcttccagggggaaacgcctggtatctttatagtcctgtcgggtttcgccacctctgacttgagcgtcgatttttgtgatgctcgtcaggggggcggagcctatggaaaaacgccagcaacgcggcctttttacggttcctggccttttgctggccttttgctcacatgttctttcctgcgttatcccctgattctgtggataaccgtattaccgcctttgagtgagctgataccgctcgccgcagccgaacgaccgagcgcagcgagtcagtgagcgaggaagcggaagagcgcccaatacgcaaaccgcctctccccgcgcgttggccgattcattaatgcagctggcacgacaggtttcccgactggaaagcgggcagtgagcgcaacgcaattaatgtgagttagctcactcattaggcaccccaggctttacactttatgcttccggctcgtatgttgtgtggaattgtgagcggataacaatttcacacaggaaacagctatgaccatgattacgccagagggcctatttcccatgattccttcatatttgcatatacgatacaaggctgttagagagataattggaattaatttgactgtaaacacaaagatattagtacaaaatacgtgacgtagaaagtaataatttcttgggtagtttgcagttttaaaattatgttttaaaatggactatcatatgcttaccgtaacttgaaagtatttcgatttcttggctttatatatcttgtggaaaggacgaaacaccatgtcttcctgggacgaagacaagttacagttaaggctctttgaaaacaacgactgtaacgaaaaaagagccttaattgtaaaacgcctatacggtgagggtatgtacgtttgggtttgtccagcctaaacctctacgccagaaatggcaccttcattgtgggttaggacaatttaattttttggtaccgagctcgaattcactggccgtcgttttacaacgtcgtgactgggaaaaccctggcgttacccaacttaatcgccttgcagcacatccccctttcgccagctggcgtaatagcgaagaggcccgcaccgatcgcccttcccaacagttgcgcagcctgaatggcgaatggcgcctgatgcggtattttctccttacgcatctgtgcggtatttcacaccgcatatggtgcactctcagtacaatctgctctgatgccgcatagttaagccagccccgacacccgccaacacccgctgacgcgccctgacgggcttgtctgctcccggcatccgcttacagacaagctgtgaccgtctccgggagctgcatgtgtcagaggttttcaccgtcatcaccgaaacgcgcgagacgaaagggcctcgtgatacgcctatttttataggttaatgtcatgataataatggtttcttagacgtcaggtggcacttttcggggaaatgtgcgcggaacccctatttgtttatttttctaaatacattcaaatatgtatccgctcatgagacaataaccctgataaatgcttcaataatattgaaaaaggaagagtatgagtattcaacatttccgtgtcgcccttattcccttttttgcggcattttgccttcctgtttttgctcacccagaaacgctggtgaaagtaaaagatgctgaagatcagttgggtgcacgagtgggttacatcgaactggatctcaacagcggtaagatccttgagagttttcgccccgaagaacgttttccaatgatgagcacttttaaagttctgctatgtggcgcggtattatcccgtattgacgccgggcaagagcaactcggtcgccgcatacactattctcagaatgacttggttgagtactcaccagtcacagaaaagcatcttacggatggcatgacagtaagagaattatgcagtgctgccataaccatgagtgataacactgcggccaacttacttctgacaacgatcggaggaccgaaggagctaaccgcttttttgcacaacatgggggatcatgtaactcgccttgatcgttgggaaccggagctgaatgaagccataccaaacgacgagcgtgacaccacgatgcctgtagcaatggcaacaacgttgcgcaaactattaactggcgaactacttactctagcttcccggcaacaattaatagactggatggaggcggataaagttgcaggaccacttctgcgctcggcccttccggctggctggtttattgctgataaatctggagccggtgagcgtgggtctcgcggtatcattgcagcactggggccagatggtaagccctcccgtatcgtagttatctacacgacggggagtcaggcaactatggatgaacgaaatagacagatcgctgagataggtgcctcactgattaagcattggtaactgtcagaccaagtttactcatatatactttagattgatttaaaacttcatttttaatttaaaaggatctaggtgaagatcctttttgataatctcatgaccaaaatcccttaacgtgagttttcgttccactgagcgtcagaccccgtagaaaagatcaaaggatcttcttgagatcctttttttctgcgcgtaatctgctgcttgcaaacaaaaaaaccaccgctaccagcggtggtttgtttgccggatcaagagctaccaactctttttccgaaggtaactggcttcagcagagcgcagataccaaatactgttcttctagtgtagccgtagttaggccaccacttcaagaactctgtagcaccgcctacatacctcgctctgctaatcct

SEQ ID NO: 25273 - DNA, 7564 bp, synthetic construct
  misc_feature 1..7564: note = Engineered IscB
  source 1..7564: mol_type = other DNA
aatcagtgaggcacctatctcagcgatctgtctatttcgttcatccatagttgcctgactccccgtcgtgtagataactacgatacgggagggcttaccatctggccccagtgctgcaatgataccgcgagacccacgctcaccggctccagatttatcagcaataaaccagccagccggaagggccgagcgcagaagtggtcctgcaactttatccgcctccatccagtctattaattgttgccgggaagctagagtaagtagttcgccagttaatagtttgcgcaacgttgttgccattgctacaggcatcgtggtgtcacgctcgtcgtttggtatggcttcattcagctccggttcccaacgatcaaggcgagttacatgatcccccatgttgtgcaaaaaagcggttagctccttcggtcctccgatcgttgtcagaagtaagttggccgcagtgttatcactcatggttatggcagcactgcataattctcttactgtcatgccatccgtaagatgcttttctgtgactggtgagtactcaaccaagtcattctgagaatagtgtatgcggcgaccgagttgctcttgcccggcgtcaatacgggataataccgcgccacatagcagaactttaaaagtgctcatcattggaaaacgttcttcggggcgaaaactctcaaggatcttaccgctgttgagatccagttcgatgtaacccactcgtgcacccaactgatcttcagcatcttttactttcaccagcgtttctgggtgagcaaaaacaggaaggcaaaatgccgcaaaaaagggaataagggcgacacggaaatgttgaatactcatactcttcctttttcaatattattgaagcatttatcagggttattgtctcatgagcggatacatatttgaatgtatttagaaaaataaacaaataggggttccgcgcacatttccccgaaaagtgccacctgacgtcgacggatcgggagatctcccgatcccctatggtgcactctcagtacaatctgctctgatgccgcatagttaagccagtatctgctccctgcttgtgtgttggaggtcgctgagtagtgcgcgagcaaaatttaagctacaacaaggcaaggcttgaccgacaattgcatgaagaatctgcttagggttaggcgttttgcgctgcttcgcgatgtacgggccagatatacgcgttgacattgattattgactagttattaatagtaatcaattacggggtcattagttcatagcccatatatggagttccgcgttacataacttacggtaaatggcccgcctggctgaccgcccaacgacccccgcccattgacgtcaataatgacgtatgttcccatagtaacgccaatagggactttccattgacgtcaatgggtggagtatttacggtaaactgcccacttggcagtacatcaagtgtatcatatgccaagtacgccccctattgacgtcaatgacggtaaatggcccgcctggcattatgcccagtacatgaccttatgggactttcctacttggcagtacatctacgtattagtcatcgctattaccatggtgatgcggttttggcagtacatcaatgggcgtggatagcggtttgactcacggggatttccaagtctccaccccattgacgtcaatgggagtttgttttggcaccaaaatcaacgggactttccaaaatgtcgtaacaactccgccccattgacgcaaatgggcggtaggcgtgtacggtgggaggtctatataagcagagctctctggctaactagagaacccactgcttactggcttatcgaaattaatacgactcactatagggagacccaagctggctagcgtttaaacttaagcttgccaccatgggatctccaaaaaagaaacggaaggtgggatccaacaccgaaacacgggaacaggtgctgggcatcgatttcggccctaagcacgttggcattgccctggtggctcggggcgctagcagcgaagaagtgctgttcgtggctgaagtgcggctgagggacagaaagagcctgctggccgatagacgggccctgcggagaggccggagagggagaaaacggtacagacagcctaagattccacaacggggaggcggcgccacaagccagagcggcgaggagtctgagcggggccgggccgccgcccctgagtaccgaagagccaccggactgaacaccggccgcagaaggtgtaaattcgttgatcctcagaccggcgagatctgcggctggaatacccctagaaaggccaatgtgcgggacctgctgctgtggaacatctgtcggcatctgccagtgtctgtgtccgagcaggccggcttcctggcatacgtgaaccagaccaacctgcacagagccgagatcctgggcgctctgcctgctgaagagcaagcccctctggaggccgtgttcagccagcagcggcggcctaaggatgaaagactgaaggatcggctgcggcgacttggtgttgatagacacctgagaagccaggtcacagacatcgtgggcatcacttctagacggcctctgtctggcagactgtccttctgcagagagcactttctgagacaccacgagcagagccgggtgcctagacccagcgtgtggctgcctaacaccgtggaaatgaagcaggccgacgtgctgaaggtgtgcagacaggaggtggcccctagatggcgggtggactgcatcgtgctggagcgggccaacttcgacctgcagctcctgcggcaacaaaccgccatcgagtggtccgtggaagattggcagcggggacctcgttggggctacaggaacaccttcgaggccaagaaacaagagcagggcaaccggtgcgcctattgtggcagcaagcctacagccaaaaacagactgagactggaactggaacacgtgatcccaggcggaggagatacatgggagaacctggtgctgagctgccggaagtgcaacgagggcaaaggaaatagaagccccgcccaggctggcatgagattctggaccgataccgaaaccggcgaaaccctgagccctgctcctctcggcgccgcccacgtgtctagatacatgacccagaccgaccagggctggcggagactgcaggccgctctgcagcaggtgttcccccaggctgctgtagagcacacctggggatacgtgaccagcttctaccggaacagatggaatctgccgaaaaagcacttcgtggacgccgccgtgatcgccagcagccacgagctggaacggcctgtgtccgtgcccgagcagccacagcggttcgcccctaccagtggaggcaagcagctgtttgacaccaaccccctaagcaagcggcctgagggcagatttgcccagtctaaggccatcgtgtgtgaacagggcacactggcctttaaggacgtggccaaggtggaaaaccctagaaagcgcgccaccctgcaaagagtggccgacgaggccacagctgcagccaaggccaggggcgagacacctccaaccgccttcaccgccgagatgctgcctaagatccccttcaagtccgtcagactggccaagcaggacgccagcgacaccaacacaagacggctgggcagacattggttcaaggtggcatctgccgtgaacatcgccacaatcgtgtaccagctggacggcaaagtgtgcatgcagctgcagagaaatcccgccgttttccgccacgaccccggcctgcctcagggagctagagtggtggccacttttcggaagggcgacctggtggagtgcgacgctggccgcggaagagtgaccaagaaccacagcaactgcacactgaccgtggaactgctcgacagcggcaaggaagtgaccagactggccaagagcttcagacccagacacggcggatccaaaaggccggcggccacgaaaaaggccggccaggcaaaaaagaaaaagggatcttacccatacgatgttccagattacgcttacccatacgatgttccagattacgcttacccatacgatgttccagattacgcttgaggccgctcgagtctagagggcccgtttaaacccgctgatcagcctcgactgtgccttctagttgccagccatctgttgtttgcccctcccccgtgccttccttgaccctggaaggtgccactcccactgtcctttcctaataaaatgaggaaattgcatcgcattgtctgagtaggtgtcattctattctggggggtggggtggggcaggacagcaagggggaggattgggaagacaatagcaggcatgctggggatgcggtgggctctatggcttctgaggcggaaagaaccagctggggctctagggggtatccccacgcgccctgtagcggcgcattaagcgcggcgggtgtggtggttacgcgcagcgtgaccgctacacttgccagcgccctagcgcccgctcctttcgctttcttcccttcctttctcgccacgttcgccggctttccccgtcaagctctaaatcgggggctccctttagggttccgatttagtgctttacggcacctcgaccccaaaaaacttgattagggtgatggttcacgtagtgggccatcgccctgatagacggtttttcgccctttgacgttggagtccacgttctttaatagtggactcttgttccaaactggaacaacactcaaccctatctcggtctattcttttgatttataagggattttgccgatttcggcctattggttaaaaaatgagctgatttaacaaaaatttaacgcgaattaattctgtggaatgtgtgtcagttagggtgtggaaagtccccaggctccccagcaggcagaagtatgcaaagcatgcatctcaattagtcagcaaccaggtgtggaaagtccccaggctccccagcaggcagaagtatgcaaagcatgcatctcaattagtcagcaaccatagtcccgcccctaactccgcccatcccgcccctaactccgcccagttccgcccattctccgccccatggctgactaattttttttatttatgcagaggccgaggccgcctctgcctctgagctattccagaagtagtgaggaggcttttttggaggcctaggcttttgcaaaaagctcccgggagcttgtatatccattttcggatctgatcaagagacaggatgaggatcgtttcgcatgattgaacaagatggattgcacgcaggttctccggccgcttgggtggagaggctattcggctatgactgggcacaacagacaatcggctgctctgatgccgccgtgttccggctgtcagcgcaggggcgcccggttctttttgtcaagaccgacctgtccggtgccctgaatgaactgcaggacgaggcagcgcggctatcgtggctggccacgacgggcgttccttgcgcagctgtgctcgacgttgtcactgaagcgggaagggactggctgctattgggcgaagtgccggggcaggatctcctgtcatctcaccttgctcctgccgagaaagtatccatcatggctgatgcaatgcggcggctgcatacgcttgatccggctacctgcccattcgaccaccaagcgaaacatcgcatcgagcgagcacgtactcggatggaagccggtcttgtcgatcaggatgatctggacgaagagcatcaggggctcgcgccagccgaactgttcgccaggctcaaggcgcgcatgcccgacggcgaggatctcgtcgtgacccatggcgatgcctgcttgccgaatatcatggtggaaaatggccgcttttctggattcatcgactgtggccggctgggtgtggcggaccgctatcaggacatagcgttggctacccgtgatattgctgaagagcttggcggcgaatgggctgaccgcttcctcgtgctttacggtatcgccgctcccgattcgcagcgcatcgccttctatcgccttcttgacgagttcttctgagcgggactctggggttcgaaatgaccgaccaagcgacgcccaacctgccatcacgagatttcgattccaccgccgccttctatgaaaggttgggcttcggaatcgttttccgggacgccggctggatgatcctccagcgcggggatctcatgctggagttcttcgcccaccccaacttgtttattgcagcttataatggttacaaataaagcaatagcatcacaaatttcacaaataaagcatttttttcactgcattctagttgtggtttgtccaaactcatcaatgtatcttatcatgtctgtataccgtcgacctctagctagagcttggcgtaatcatggtcatagctgtttcctgtgtgaaattgttatccgctcacaattccacacaacatacgagccggaagcataaagtgtaaagcctggggtgcctaatgagtgagctaactcacattaattgcgttgcgctcactgcccgctttccagtcgggaaacctgtcgtgccagctgcattaatgaatcggccaacgcgcggggagaggcggtttgcgtattgggcgctcttccgcttcctcgctcactgactcgctgcgctcggtcgttcggctgcggcgagcggtatcagctcactcaaaggcggtaatacggttatccacagaatcaggggataacgcaggaaagaacatgtgagcaaaaggccagcaaaaggccaggaaccgtaaaaaggccgcgttgctggcgtttttccataggctccgcccccctgacgagcatcacaaaaatcgacgctcaagtcagaggtggcgaaacccgacaggactataaagataccaggcgtttccccctggaagctccctcgtgcgctctcctgttccgaccctgccgcttaccggatacctgtccgcctttctcccttcgggaagcgtggcgctttctcatagctcacgctgtaggtatctcagttcggtgtaggtcgttcgctccaagctgggctgtgtgcacgaaccccccgttcagcccgaccgctgcgccttatccggtaactatcgtcttgagtccaacccggtaagacacgacttatcgccactggcagcagccactggtaacaggattagcagagcgaggtatgtaggcggtgctacagagttcttgaagtggtggcctaactacggctacactagaagaacagtatttggtatctgcgctctgctgaagccagttaccttcggaaaaagagttggtagctcttgatccggcaaacaaaccaccgctggtagcggtttttttgtttgcaagcagcagattacgcgcagaaaaaaaggatctcaagaagatcctttgatcttttctacggggtctgacgctcagtggaacgaaaactcacgttaagggattttggtcatgagattatcaaaaaggatcttcacctagatccttttaaattaaaaatgaagttttaaatcaatctaaagtatatatgagtaaacttggtctgacagttaccaatgctt

SEQ ID NO: 25274 - DNA, 7753 bp, synthetic construct
  misc_feature 1..7753: note = Engineered IscB
  source 1..7753: mol_type = other DNA
aatcagtgaggcacctatctcagcgatctgtctatttcgttcatccatagttgcctgactccccgtcgtgtagataactacgatacgggagggcttaccatctggccccagtgctgcaatgataccgcgagacccacgctcaccggctccagatttatcagcaataaaccagccagccggaagggccgagcgcagaagtggtcctgcaactttatccgcctccatccagtctattaattgttgccgggaagctagagtaagtagttcgccagttaatagtttgcgcaacgttgttgccattgctacaggcatcgtggtgtcacgctcgtcgtttggtatggcttcattcagctccggttcccaacgatcaaggcgagttacatgatcccccatgttgtgcaaaaaagcggttagctccttcggtcctccgatcgttgtcagaagtaagttggccgcagtgttatcactcatggttatggcagcactgcataattctcttactgtcatgccatccgtaagatgcttttctgtgactggtgagtactcaaccaagtcattctgagaatagtgtatgcggcgaccgagttgctcttgcccggcgtcaatacgggataataccgcgccacatagcagaactttaaaagtgctcatcattggaaaacgttcttcggggcgaaaactctcaaggatcttaccgctgttgagatccagttcgatgtaacccactcgtgcacccaactgatcttcagcatcttttactttcaccagcgtttctgggtgagcaaaaacaggaaggcaaaatgccgcaaaaaagggaataagggcgacacggaaatgttgaatactcatactcttcctttttcaatattattgaagcatttatcagggttattgtctcatgagcggatacatatttgaatgtatttagaaaaataaacaaataggggttccgcgcacatttccccgaaaagtgccacctgacgtcgacggatcgggagatctcccgatcccctatggtgcactctcagtacaatctgctctgatgccgcatagttaagccagtatctgctccctgcttgtgtgttggaggtcgctgagtagtgcgcgagcaaaatttaagctacaacaaggcaaggcttgaccgacaattgcatgaagaatctgcttagggttaggcgttttgcgctgcttcgcgatgtacgggccagatatacgcgttgacattgattattgactagttattaatagtaatcaattacggggtcattagttcatagcccatatatggagttccgcgttacataacttacggtaaatggcccgcctggctgaccgcccaacgacccccgcccattgacgtcaataatgacgtatgttcccatagtaacgccaatagggactttccattgacgtcaatgggtggagtatttacggtaaactgcccacttggcagtacatcaagtgtatcatatgccaagtacgccccctattgacgtcaatgacggtaaatggcccgcctggcattatgcccagtacatgaccttatgggactttcctacttggcagtacatctacgtattagtcatcgctattaccatggtgatgcggttttggcagtacatcaatgggcgtggatagcggtttgactcacggggatttccaagtctccaccccattgacgtcaatgggagtttgttttggcaccaaaatcaacgggactttccaaaatgtcgtaacaactccgccccattgacgcaaatgggcggtaggcgtgtacggtgggaggtctatataagcagagctctctggctaactagagaacccactgcttactggcttatcgaaattaatacgactcactatagggagacccaagctggctagcgtttaaacttaagcttgccaccatgggatctccaaaaaagaaacggaaggtgggatccgaaaaggaactggtgctgggcatcgactacggcggtaagtacaccggcctaggcgttgtggacagaagaaacaaccaggtgctgtacgccagaaccatcaaaatgagagatgatgtggccgacatcctgaagggcagaagggagcagagaggcatcagaagaacccaacagaccagaaagaaaagactgagagagctgaaaaagtacctgaacagcattggatatgacaacagcaccgagctgttcaagtctatctacagcctggctcataagagaggctacgattacgccgacatgcctacccctgaggaaatcgaggagatggacgagaaggaaaagaaggagtggaaggatacccagagaaattctcggtacagaaaggaagtgctggccgacgtgcggaaggtgatgagcaacggcggagcctccgatgagcagatcaagagagtggagtccatctttaacaagcagtaccggcccaagagattcaacaatagaatcctgaccaaatgcaaagtgtgcggcaagaacacccctctgagaagaaacgtgcgggaactcctgctggaaaacatcgtgcggtttctgcctctggaaagcgagctgaaggaaacactcaagagaaccatcctggaaggccagcagggcaatatcaacaagctgttcaggaaacttaaattcaatcaaaaggattggcctggcaaaaacctgaccgatatcgctaagaataagctgccaggccggctgcccttctgcaaggagcacttcgccgagaacgagaagttcaccaccatcgagaagagcaccttccggctggcccctagcctgaaaacaaagatcgagaatgtgctgaccgtgattaaagatgaggtgatgccaaactttgcactggacagagtggtgatggaaagcaacaacttcgacatcgccgctaagacaaaggggaagaaacggctggctaaggaggagtacagcaagggccacaaggaaaacagagaaaccctgatggaaagcctgctgagagagacagatggaagatgcgtctactgcggcaagaccattacactggctgacgccaacaaggaccacatctatcctaagaaggccggcggcagcaacatcttcgccaatctggttgcttgttgtagatcctgcaacgagaacaagggaggcagaacacccagcgagtctggcatcatgcctaatcctgaggtggtggcaaccatcaagaacgacctgaagaagaagatcctcgacgacgccagaagcatcaaacagctggacttcaacaaatacatgagccacgccagcatcggctggcggcacatgcgggacagacttaaggagctgacaggcaacgacaagctgcctgtggaaagactgagcggcattgtgaccgcctatttcagaagatggtggggcttcaagaaggagagagccaacgacaagcaccacgccctggatgccgtgatcctggcctcaagaaaggactacaccgacgagggcctcgtggctatgaccctgaagcctgccaatagcgacggcagagagttcgaccccgagaagcatatcaaggaatctgaagagttcaagcgcaacaagggcagccggggcagcgccctgtacgacaagaaccctctgagcatcaagaacggtaaaatcgccagacggtacatggtgacagagatcgagagaggcaaagaagatgctgtgatcagcgaggaatggagagagaagctgaaggaagccttcgatagattcggcgtgtccaacggcaaatgtctgaccgacctgcagaccaaggaggtgggactgtacggccagaagaacccaatgtctctgaaatgcgccgtgcgtggcgccggaaagggccaaatcgtgctgatcggaaacaacgcctttaagacgaacgtgcacaacgtgggcgtggccgtgtacctggacgagaaaggaaaaaagcgggcctgcgagctgaagaaccagcggctggccaagcacttcgtggaaccccaggacgagatcaagggcaagatcctgtttaccctgcggaagggcgacacagtgaaggccgaagatggcaacatctacagaatcctcgaactgggagagcggcctgtcgtggacatcaagtgggtccccacaagcgatggaaagaagaagcgggtgaaaaccgccatccacgccacaaaactgacaaagctgggatccaaaaggccggcggccacgaaaaaggccggccaggcaaaaaagaaaaagggatcttacccatacgatgttccagattacgcttacccatacgatgttccagattacgcttacccatacgatgttccagattacgcttgaggccgctcgagtctagagggcccgtttaaacccgctgatcagcctcgactgtgccttctagttgccagccatctgttgtttgcccctcccccgtgccttccttgaccctggaaggtgccactcccactgtcctttcctaataaaatgaggaaattgcatcgcattgtctgagtaggtgtcattctattctggggggtggggtggggcaggacagcaagggggaggattgggaagacaatagcaggcatgctggggatgcggtgggctctatggcttctgaggcggaaagaaccagctggggctctagggggtatccccacgcgccctgtagcggcgcattaagcgcggcgggtgtggtggttacgcgcagcgtgaccgctacacttgccagcgccctagcgcccgctcctttcgctttcttcccttcctttctcgccacgttcgccggctttccccgtcaagctctaaatcgggggctccctttagggttccgatttagtgctttacggcacctcgaccccaaaaaacttgattagggtgatggttcacgtagtgggccatcgccctgatagacggtttttcgccctttgacgttggagtccacgttctttaatagtggactcttgttccaaactggaacaacactcaaccctatctcggtctattcttttgatttataagggattttgccgatttcggcctattggttaaaaaatgagctgatttaacaaaaatttaacgcgaattaattctgtggaatgtgtgtcagttagggtgtggaaagtccccaggctccccagcaggcagaagtatgcaaagcatgcatctcaattagtcagcaaccaggtgtggaaagtccccaggctccccagcaggcagaagtatgcaaagcatgcatctcaattagtcagcaaccatagtcccgcccctaactccgcccatcccgcccctaactccgcccagttccgcccattctccgccccatggctgactaattttttttatttatgcagaggccgaggccgcctctgcctctgagctattccagaagtagtgaggaggcttttttggaggcctaggcttttgcaaaaagctcccgggagcttgtatatccattttcggatctgatcaagagacaggatgaggatcgtttcgcatgattgaacaagatggattgcacgcaggttctccggccgcttgggtggagaggctattcggctatgactgggcacaacagacaatcggctgctctgatgccgccgtgttccggctgtcagcgcaggggcgcccggttctttttgtcaagaccgacctgtccggtgccctgaatgaactgcaggacgaggcagcgcggctatcgtggctggccacgacgggcgttccttgcgcagctgtgctcgacgttgtcactgaagcgggaagggactggctgctattgggcgaagtgccggggcaggatctcctgtcatctcaccttgctcctgccgagaaagtatccatcatggctgatgcaatgcggcggctgcatacgcttgatccggctacctgcccattcgaccaccaagcgaaacatcgcatcgagcgagcacgtactcggatggaagccggtcttgtcgatcaggatgatctggacgaagagcatcaggggctcgcgccagccgaactgttcgccaggctcaaggcgcgcatgcccgacggcgaggatctcgtcgtgacccatggcgatgcctgcttgccgaatatcatggtggaaaatggccgcttttctggattcatcgactgtggccggctgggtgtggcggaccgctatcaggacatagcgttggctacccgtgatattgctgaagagcttggcggcgaatgggctgaccgcttcctcgtgctttacggtatcgccgctcccgattcgcagcgcatcgccttctatcgccttcttgacgagttcttctgagcgggactctggggttcgaaatgaccgaccaagcgacgcccaacctgccatcacgagatttcgattccaccgccgccttctatgaaaggttgggcttcggaatcgttttccgggacgccggctggatgatcctccagcgcggggatctcatgctggagttcttcgcccaccccaacttgtttattgcagcttataatggttacaaataaagcaatagcatcacaaatttcacaaataaagcatttttttcactgcattctagttgtggtttgtccaaactcatcaatgtatcttatcatgtctgtataccgtcgacctctagctagagcttggcgtaatcatggtcatagctgtttcctgtgtgaaattgttatccgctcacaattccacacaacatacgagccggaagcataaagtgtaaagcctggggtgcctaatgagtgagctaactcacattaattgcgttgcgctcactgcccgctttccagtcgggaaacctgtcgtgccagctgcattaatgaatcggccaacgcgcggggagaggcggtttgcgtattgggcgctcttccgcttcctcgctcactgactcgctgcgctcggtcgttcggctgcggcgagcggtatcagctcactcaaaggcggtaatacggttatccacagaatcaggggataacgcaggaaagaacatgtgagcaaaaggccagcaaaaggccaggaaccgtaaaaaggccgcgttgctggcgtttttccataggctccgcccccctgacgagcatcacaaaaatcgacgctcaagtcagaggtggcgaaacccgacaggactataaagataccaggcgtttccccctggaagctccctcgtgcgctctcctgttccgaccctgccgcttaccggatacctgtccgcctttctcccttcgggaagcgtggcgctttctcatagctcacgctgtaggtatctcagttcggtgtaggtcgttcgctccaagctgggctgtgtgcacgaaccccccgttcagcccgaccgctgcgccttatccggtaactatcgtcttgagtccaacccggtaagacacgacttatcgccactggcagcagccactggtaacaggattagcagagcgaggtatgtaggcggtgctacagagttcttgaagtggtggcctaactacggctacactagaagaacagtatttggtatctgcgctctgctgaagccagttaccttcggaaaaagagttggtagctcttgatccggcaaacaaaccaccgctggtagcggtttttttgtttgcaagcagcagattacgcgcagaaaaaaaggatctcaagaagatcctttgatcttttctacggggtctgacgctcagtggaacgaaaactcacgttaagggattttggtcatgagattatcaaaaaggatcttcacctagatccttttaaattaaaaatgaagttttaaatcaatctaaagtatatatgagtaaacttggtctgacagttaccaatgctt

SEQ ID NO: 25275 - DNA, 7117 bp, synthetic construct
  misc_feature 1..7117: note = Engineered IscB
  source 1..7117: mol_type = other DNA
aatcagtgaggcacctatctcagcgatctgtctatttcgttcatccatagttgcctgactccccgtcgtgtagataactacgatacgggagggcttaccatctggccccagtgctgcaatgataccgcgagacccacgctcaccggctccagatttatcagcaataaaccagccagccggaagggccgagcgcagaagtggtcctgcaactttatccgcctccatccagtctattaattgttgccgggaagctagagtaagtagttcgccagttaatagtttgcgcaacgttgttgccattgctacaggcatcgtggtgtcacgctcgtcgtttggtatggcttcattcagctccggttcccaacgatcaaggcgagttacatgatcccccatgttgtgcaaaaaagcggttagctccttcggtcctccgatcgttgtcagaagtaagttggccgcagtgttatcactcatggttatggcagcactgcataattctcttactgtcatgccatccgtaagatgcttttctgtgactggtgagtactcaaccaagtcattctgagaatagtgtatgcggcgaccgagttgctcttgcccggcgtcaatacgggataataccgcgccacatagcagaactttaaaagtgctcatcattggaaaacgttcttcggggcgaaaactctcaaggatcttaccgctgttgagatccagttcgatgtaacccactcgtgcacccaactgatcttcagcatcttttactttcaccagcgtttctgggtgagcaaaaacaggaaggcaaaatgccgcaaaaaagggaataagggcgacacggaaatgttgaatactcatactcttcctttttcaatattattgaagcatttatcagggttattgtctcatgagcggatacatatttgaatgtatttagaaaaataaacaaataggggttccgcgcacatttccccgaaaagtgccacctgacgtcgacggatcgggagatctcccgatcccctatggtgcactctcagtacaatctgctctgatgccgcatagttaagccagtatctgctccctgcttgtgtgttggaggtcgctgagtagtgcgcgagcaaaatttaagctacaacaaggcaaggcttgaccgacaattgcatgaagaatctgcttagggttaggcgttttgcgctgcttcgcgatgtacgggccagatatacgcgttgacattgattattgactagttattaatagtaatcaattacggggtcattagttcatagcccatatatggagttccgcgttacataacttacggtaaatggcccgcctggctgaccgcccaacgacccccgcccattgacgtcaataatgacgtatgttcccatagtaacgccaatagggactttccattgacgtcaatgggtggagtatttacggtaaactgcccacttggcagtacatcaagtgtatcatatgccaagtacgccccctattgacgtcaatgacggtaaatggcccgcctggcattatgcccagtacatgaccttatgggactttcctacttggcagtacatctacgtattagtcatcgctattaccatggtgatgcggttttggcagtacatcaatgggcgtggatagcggtttgactcacggggatttccaagtctccaccccattgacgtcaatgggagtttgttttggcaccaaaatcaacgggactttccaaaatgtcgtaacaactccgccccattgacgcaaatgggcggtaggcgtgtacggtgggaggtctatataagcagagctctctggctaactagagaacccactgcttactggcttatcgaaattaatacgactcactatagggagacccaagctggctagcgtttaaacttaagcttgccaccatgggatctccaaaaaagaaacggaaggtgggatctatgaactacatcgacttcgtgttcgtgaccgacaaggacaatctgccttgcaaccccatcaacgagggatatgccggcaaactgctgcggaccggcaaggccaagatcgtgaaccacgaccccctggtgatcaagagacttgacgattatagcagcaaaaacgagaatcggcacacaatcacactgaaggtggacaccggctttggcaacatcggcttcagcgcctccgacaacaaacacgagtacatcgccggccaggtggaactgctgagcggcatctctgatcggctggtcacaagaaagggctaccggacacagagaaggagcagactgagataccggcggaacaaaaacatcgattacaagaccgtgaacaaccccacctacaaaaacggcaacgaggacggctggctggcccctagcgtgatccacaagatcgagagccacgtgcgggtgattgataagatcgctctgtggattcctatcgacaaggtcattattgagactgctaacttcgacatccagcagatcaaggccaccctgaacggcatcgtgatcaacggcatcgactaccagaagggcgagatgtacggattcgagaacgccaagcagtacgtgcgggaaagagataactacacctgtcagatctgcaaggaaaagctgaccgacaaaagacacgtggtgatcgaggtgcaccacatcatccctagaagcaagggcggcagcaacaaacctgacaacatgatcagcctgtgtcactgctgccacaagaaggtccatgagaacaacaacgacaacaagctgttcagagaactgcaacagcggaagatcatcaacacctacaaagacgccaccttcatgaataccatgagatgggagctgtacaacagactgaaagaaaactacgacgtgtccatctctttcggatacatcacaagaatgaatagaaaaaacgccggactgaagaagtaccactacacagacgccgtgtgcatcagcgagtaccataagattacactgaccagaaacgtgtacctggtggaacaaaagcggtgtaatgacagatgcatggaatctttttttgacgctaagtacattgatagccgggacggcaaggtgaaaaagggcagcgagctgtgcaaacttagagtggccacagcctccagcaagcgcagcaccaagaaagaggatatcgacaacaagagaatctacagacaggagaaggtgtctaagggaaaaagacgctacgagaaccacagctactgcctgaagcctggcgatctgatctacatcaactacggcaatcacaagggcaacatcgccgaggtgaccaccatgcagaagaatcctaacgggacctacaagatcgtgttctcttacgccaacccaaagtgcaagatcccctccatcaatatcaaggagaaggaatatgaagagctcacccacaatcagtgtgaaaaggtcaagatcgttagaaccagaagaggcatgatctggcggaaggttaatagactggaattcgaggaaaacacagctgagcagatcgataagaaggtgaagaataagggatccaaaaggccggcggccacgaaaaaggccggccaggcaaaaaagaaaaagggatcttacccatacgatgttccagattacgcttacccatacgatgttccagattacgcttacccatacgatgttccagattacgcttgaggccgctcgagtctagagggcccgtttaaacccgctgatcagcctcgactgtgccttctagttgccagccatctgttgtttgcccctcccccgtgccttccttgaccctggaaggtgccactcccactgtcctttcctaataaaatgaggaaattgcatcgcattgtctgagtaggtgtcattctattctggggggtggggtggggcaggacagcaagggggaggattgggaagacaatagcaggcatgctggggatgcggtgggctctatggcttctgaggcggaaagaaccagctggggctctagggggtatccccacgcgccctgtagcggcgcattaagcgcggcgggtgtggtggttacgcgcagcgtgaccgctacacttgccagcgccctagcgcccgctcctttcgctttcttcccttcctttctcgccacgttcgccggctttccccgtcaagctctaaatcgggggctccctttagggttccgatttagtgctttacggcacctcgaccccaaaaaacttgattagggtgatggttcacgtagtgggccatcgccctgatagacggtttttcgccctttgacgttggagtccacgttctttaatagtggactcttgttccaaactggaacaacactcaaccctatctcggtctattcttttgatttataagggattttgccgatttcggcctattggttaaaaaatgagctgatttaacaaaaatttaacgcgaattaattctgtggaatgtgtgtcagttagggtgtggaaagtccccaggctccccagcaggcagaagtatgcaaagcatgcatctcaattagtcagcaaccaggtgtggaaagtccccaggctccccagcaggcagaagtatgcaaagcatgcatctcaattagtcagcaaccatagtcccgcccctaactccgcccatcccgcccctaactccgcccagttccgcccattctccgccccatggctgactaattttttttatttatgcagaggccgaggccgcctctgcctctgagctattccagaagtagtgaggaggcttttttggaggcctaggcttttgcaaaaagctcccgggagcttgtatatccattttcggatctgatcaagagacaggatgaggatcgtttcgcatgattgaacaagatggattgcacgcaggttctccggccgcttgggtggagaggctattcggctatgactgggcacaacagacaatcggctgctctgatgccgccgtgttccggctgtcagcgcaggggcgcccggttctttttgtcaagaccgacctgtccggtgccctgaatgaactgcaggacgaggcagcgcggctatcgtggctggccacgacgggcgttccttgcgcagctgtgctcgacgttgtcactgaagcgggaagggactggctgctattgggcgaagtgccggggcaggatctcctgtcatctcaccttgctcctgccgagaaagtatccatcatggctgatgcaatgcggcggctgcatacgcttgatccggctacctgcccattcgaccaccaagcgaaacatcgcatcgagcgagcacgtactcggatggaagccggtcttgtcgatcaggatgatctggacgaagagcatcaggggctcgcgccagccgaactgttcgccaggctcaaggcgcgcatgcccgacggcgaggatctcgtcgtgacccatggcgatgcctgcttgccgaatatcatggtggaaaatggccgcttttctggattcatcgactgtggccggctgggtgtggcggaccgctatcaggacatagcgttggctacccgtgatattgctgaagagcttggcggcgaatgggctgaccgcttcctcgtgctttacggtatcgccgctcccgattcgcagcgcatcgccttctatcgccttcttgacgagttcttctgagcgggactctggggttcgaaatgaccgaccaagcgacgcccaacctgccatcacgagatttcgattccaccgccgccttctatgaaaggttgggcttcggaatcgttttccgggacgccggctggatgatcctccagcgcggggatctcatgctggagttcttcgcccaccccaacttgtttattgcagcttataatggttacaaataaagcaatagcatcacaaatttcacaaataaagcatttttttcactgcattctagttgtggtttgtccaaactcatcaatgtatcttatcatgtctgtataccgtcgacctctagctagagcttggcgtaatcatggtcatagctgtttcctgtgtgaaattgttatccgctcacaattccacacaacatacgagccggaagcataaagtgtaaagcctggggtgcctaatgagtgagctaactcacattaattgcgttgcgctcactgcccgctttccagtcgggaaacctgtcgtgccagctgcattaatgaatcggccaacgcgcggggagaggcggtttgcgtattgggcgctcttccgcttcctcgctcactgactcgctgcgctcggtcgttcggctgcggcgagcggtatcagctcactcaaaggcggtaatacggttatccacagaatcaggggataacgcaggaaagaacatgtgagcaaaaggccagcaaaaggccaggaaccgtaaaaaggccgcgttgctggcgtttttccataggctccgcccccctgacgagcatcacaaaaatcgacgctcaagtcagaggtggcgaaacccgacaggactataaagataccaggcgtttccccctggaagctccctcgtgcgctctcctgttccgaccctgccgcttaccggatacctgtccgcctttctcccttcgggaagcgtggcgctttctcatagctcacgctgtaggtatctcagttcggtgtaggtcgttcgctccaagctgggctgtgtgcacgaaccccccgttcagcccgaccgctgcgccttatccggtaactatcgtcttgagtccaacccggtaagacacgacttatcgccactggcagcagccactggtaacaggattagcagagcgaggtatgtaggcggtgctacagagttcttgaagtggtggcctaactacggctacactagaagaacagtatttggtatctgcgctctgctgaagccagttaccttcggaaaaagagttggtagctcttgatccggcaaacaaaccaccgctggtagcggtttttttgtttgcaagcagcagattacgcgcagaaaaaaaggatctcaagaagatcctttgatcttttctacggggtctgacgctcagtggaacgaaaactcacgttaagggattttggtcatgagattatcaaaaaggatcttcacctagatccttttaaattaaaaatgaagttttaaatcaatctaaagtatatatgagtaaacttggtctgacagttaccaatgctt

SEQ ID NO: 25276 - protein, 499 aa, synthetic construct; identical to SEQ ID NO: 19708
  REGION 1..499: note = Engineered IscB

SEQ ID NO: 25277 - DNA, 205 bp, synthetic construct
  misc_feature 1..205: note = Engineered IscB
  source 1..205: mol_type = other DNA
gtcaataacccatgactgaagtcatgggcttgcagatgcaggtcctgatggaagaaagggttactgagcagagcagtgacatgtcattcgccgcggggtgattccaagctccgcgctccggctagacatgcccatgctatggaaactttaacggtatgtgcggttttccgctcataccggcttacaacaaataaggagttattag

SEQ ID NO: 25278 - protein, 598 aa, synthetic construct; identical to SEQ ID NO: 25200
  REGION 1..598: note = Engineered IscB

SEQ ID NO: 25279 - DNA, 183 bp, synthetic construct
  misc_feature 1..183: note = Engineered IscB
  source 1..183: mol_type = other DNA
gtcaataacccatgactgaagtcatgggcttgcagatgcaggtcctgatggaagaaagggttactgagcagagcagtgacatgtcattcgccgcggggtgattccaagctccgcgctccggctagacatgcccatgctatggaaactttaacggtatgtgcggttttccgctcataccggctt

SEQ ID NO: 25280 - protein, 598 aa, synthetic construct; identical to SEQ ID NO: 25200
  REGION 1..598: note = Engineered IscB
